(19) United States
(12) Patent Application Publication
(10) Pub. No.: US 2019/0194713 A1
(43) Pub. Date: Jun. 27, 2019

(54) PRODUCTION OF SELENO-BIOLOGICS IN GENOMICALLY RECODED ORGANISMS

(71) Applicants: Christopher J. GREGG, Melrose, MA (US); BOARD OF REGENTS, THE UNIVERSITY OF TEXAS SYSTEM, Austin, TX (US); PRESIDENT AND FELLOWS OF HARVARD COLLEGE, Cambridge, MA (US)

(72) Inventors: Daniel J. MANDELL, Brookline, MA (US); Christopher J. GREGG, Melrose, MA (US); Ross THYER, Austin, TX (US); Andrew D. ELLINGTON, Austin, TX (US); Peter Benjamin STRANGES, Somerville, MA (US)

(21) Appl. No.: 16/329,761

(22) PCT Filed: Aug. 30, 2017
(86) PCT No.: PCT/US2017/049354

§ 371 Date: Feb. 28, 2019

Related U.S. Application Data
(60) Provisional application No. 62/381,316, filed on Aug. 30, 2016.
(60) Provisional application No. 62/537,986, filed on Jul. 28, 2017.

(51) Int. Cl. C12P 21/02; C07K 14/62; C12N 15/11; C07K 16/18

(52) U.S. Cl. CPC C12P 21/02; C07K 14/62; A61K 38/00; C07K 16/18; C12N 15/11

(57) ABSTRACT

Polypeptides that fold into biologies are stabilized by diselenide bonds between selenocysteine amino acids. Methods to produce such polypeptides in genomically recoded organisms (GRO) can be scaled up for industrial production. Since diselenides have the same geometric bond angles and torsions as disulfides, as well as very similar bond lengths, they can be substituted into polypeptides without disrupting the three dimensional structure of the polypeptides. Diselenides render the polypeptides resistant to reduction when they are exposed to blood serum or to reducing components of blood serum or to reducing components components within cells.

[0001] This application claims the benefit of U.S. Provisional Patent Application Nos. 62/381,316, filed Aug. 30, 2016, and 62/537,986, filed Jul. 28, 2017, the entirety of which are incorporated herein by reference.

[0002] The sequence listing that is contained in the file named “UTFB_P1174WO.txt”, which is 3305 KB (as measured in Microsoft Windows) and was created on Aug. 30, 2017, is filed herewith by electronic submission and is incorporated by reference herein.

[0003] This invention was made with government support under Grant no. FA9550-10-1-0169 awarded by Office of Naval Research and Grant no. N66001-14-2-4051 awarded by the Space and Naval Warfare Systems Center, Pacific. The government has certain rights in the invention.

### TECHNICAL FIELD OF THE INVENTION

[0004] This invention is related to the area of protein biologics. In particular, it relates to methods to make protein biologics with beneficial properties.

### BACKGROUND OF THE INVENTION

[0005] Protein biologics, which include monoclonal antibodies, protein therapeutics and vaccines, are effective therapies for cancer, infection, and immunological and other diseases, comprising a multi-billion dollar market. But most biologics must be made in expensive mammalian cell systems in large part because they are stabilized by chemical bonds—called disulfides—that cannot form in microbial cells. Further, because disulfide bonds are prone to chemical reduction, they can break in environments like blood serum and inside cells, so that many biologics have poor half-lives.

[0006] The vast majority of biologics—including 98% of therapeutic monoclonal antibodies—are produced in mammalian systems like Chinese hamster ovary (CHO) cells. CHO cells have the advantage of producing human-like glycosylation, and possess the necessary folding chaperones and redox machinery to produce disulfide-bearing proteins at high yield. However, CHO cells require substantially higher capital expenditures than microbial facilities, longer production times (weeks to months vs. days), many-fold higher consumables cost (e.g., media), and additional purification steps to remove endogenous retrovirus-like particles.

[0007] There are two existing approaches to producing disulfide-bearing biologics in bacteria. The first is to change the chemical environment inside the cell to become oxidizing and permissive to disulfide formation, but this change dramatically impacts central metabolism and may impair fermentation performance as well as protein production. The second approach is to secrete the nascent biologic to a smaller oxidizing compartment called the periplasm. This approach produces poor yields due to energetic losses during export, and also is highly susceptible to product loss through aggregation. Due to these shortcomings, neither approach has gained widespread adoption for large-scale production of disulfide-bearing biologics, so that more expensive mammalian bio-processes dominate. Importantly, neither approach solves the intrinsic problem that disulfide bonds are sensitive to reducing agents in environments like the cytoplasm or blood.

[0008] There is a continuing need in the art for methods of producing protein biologics in a cost effective way. There is a continuing need in the art for method of producing protein biologics that are stable in blood and cytoplasm.

### SUMMARY OF THE INVENTION

[0009] According to one aspect of the invention a protein is provided which comprises at least two selenocysteine residues with at least one diselenide bond between the at least least two selenocysteine residues. The protein comprises a sequence selected from the group consisting of: SEQ ID NO: 1-1631 and sequences that are at least 80% identical to said sequence. The protein may comprise a sequence selected from the group consisting of: SEQ ID NO: 1-1630 and sequences that are at least 80% identical to said sequence. The protein may comprise a sequence of SEQ ID NO: 1631 and sequences that are at least 80% identical to said sequence.

[0010] According to another aspect of the invention an antibody molecule is provided which comprises (i) a heavy chain sequence selected from the group consisting of SEQ ID NO: 472-801 and sequences that are at least 80% identical to said sequence; and (ii) a light chain sequence selected from the group consisting of SEQ ID NO: 812-1131 and sequences that are at least 80% identical to said sequence. From 0-15 pairs of selenocysteine residues in the antibody molecule are replaced with from 0-15 pairs of cysteine residues. The antibody may contain at least one diselenide bond between the heavy chain and the light chain. The antibody may contain at least one intra-chain diselenide bond within the heavy chain and/or within the light chain.

[0011] According to yet another aspect of the invention a modified insulin protein is provided. It comprises (i) an A chain having a sequence selected from SEQ ID NO: 1142, 1144, 1146, 1148, 1150, 1152, and 1154 and sequences that are at least 80% identical to said sequence; and (ii) a B chain having a sequence selected from SEQ ID NO: 1143, 1145, 1147, 1149, 1151, 1153, and 1155 and sequences that are at least 80% identical to said sequence. The protein comprises at least one diselenide bond between the A chain and the B chain.

[0012] According to one aspect of the invention a bacterial host is provided that has been genomically recoded so that an unassigned codon is recognized by a selenocysteine tRNA with a corresponding anticodon. The bacterial host contains a constructed DNA sequence encoding a variant form of a protein in which a pair of cysteine codons has been replaced with the unassigned codon. The variant form comprises a sequence selected from the group consisting of SEQ ID NO: 1-1631 and sequences that are at least 80% identical to said sequence. The variant form may comprise a sequence selected from the group consisting of SEQ ID NO: 1-1630 and sequences that are at least 80% identical to said sequence. The variant form may comprise a sequence of SEQ ID NO: 1631 and sequences that are at least 80% identical to said sequence.

[0013] According to another aspect of the invention a bacterial host is provided. The bacterial host has been genomically recoded so that an unassigned codon is recognized by a selenocysteine tRNA with a corresponding anticodon. The bacterial host contains a constructed DNA sequence encoding a variant form of a monoclonal antibody in which a pair of cysteine codons has been replaced with the unassigned codon. The monoclonal antibody comprises a VL chain, and positions 23 and 88 of the VL chain are substituted with selenocysteine residues. The monoclonal antibody comprises a VH chain, and positions 22 and 92 of the VH chain are substituted with selenocysteine residues.

[0014] According to yet another aspect of the invention a method of producing a variant form of a protein is provided. The protein has a disulfide bond between cysteine residues, and the variant form has a diselenide bond between selenocysteine residues. A bacterial host that has been genomically recoded so that an unassigned codon is recognized by a selenocysteine tRNA with a corresponding anticodon is cultured. The bacterial host contains a constructed DNA sequence encoding the variant form of the protein in which a pair of cysteine codons has been replaced with the unassigned codon. The culturing is performed under conditions in which the variant form of the protein is expressed. The variant form comprises a sequence selected from the group consisting of SEQ ID NO: 1-1631 and sequences that are at least 80% identical to said sequence. The variant form may comprise a sequence selected from the group consisting of SEQ ID NO: 1-1630 and sequences that are at least 80% identical to said sequence. The variant form may comprise a sequence of SEQ ID NO: 1631 and sequences that are at least 80% identical to said sequence.

[0015] According to one aspect of the invention a method of producing a variant form of a monoclonal antibody is provided. The monoclonal antibody has a disulfide bond between cysteine residues, and the variant form has a diselenide bond between selenocysteine residues. A bacterial host that has been genomically recoded so that an an unassigned codon is recognized by a selenocysteine tRNA with a corresponding anticodon is cultured. The bacterial host contains a constructed DNA sequence encoding the variant form of the monoclonal antibody in which a pair of cysteine codons has been replaced with the unassigned codon. The culturing is performed under conditions in which the variant form of the monoclonal antibody is expressed. The monoclonal antibody comprises a VL chain, and positions 23 and 88 of the VL chain are substituted with selenocysteine residues. The monoclonal antibody comprises a VH chain and positions 22 and 92 of the VH chain are substituted with selenocysteine residues.

[0016] According to another aspect of the invention a method of treating a mammal with a variant form of a protein is provided. The variant form of the protein is administered to the mammal. The protein has a disulfide bond between cysteine residues. The variant form has a diselenide bond between selenocysteine residues in place of the disulfide bond between cysteine residues. The variant form comprises a sequence selected from the group consisting of SEQ ID NO: 1-1631 and sequences that are at least 80% identical to said sequence. The variant form may comprise a sequence selected from the group consisting of SEQ ID NO: 1-1630 and sequences that are at least 80% identical to said sequence. The variant form may comprise a sequence of SEQ ID NO: 1631 and sequences that are at least 80% identical to said sequence.

[0017] According to yet another aspect of the invention a method is provided of treating a mammal with a variant form of a monoclonal antibody. The variant form of the monoclonal antibody is administered to the mammal. The monoclonal antibody has a disulfide bond between cysteine residues, wherein the variant form has a diselenide bond between selenocysteine residues in place of the disulfide bond between cysteine residues. The monoclonal antibody comprises a VL chain, and positions 23 and 88 of the VL chain are substituted with selenocysteine residues. The monoclonal antibody comprises a VH chain and positions 22 and 92 of the VH chain are substituted with selenocysteine residues.

[0018] According to one aspect of the invention an in vitro translation system comprising a constructed nucleic acid molecule and a tRNA molecule are provided. The constructed nucleic acid molecule encodes a variant form of a protein in which a pair of cysteine residues has been replaced with a pair of selenocysteine residues. The variant form comprises a sequence selected from the group consisting of SEQ ID NO: 1-1631 and sequences that are at least 80% identical to said sequence. The variant form may comprise a sequence selected from the group consisting of SEQ ID NO: 1-1630 and sequences that are at least 80% identical to said sequence. The variant form may comprise a sequence of SEQ ID NO: 1631 and sequences that are at least 80% identical to said sequence. The nucleic acid molecule comprises an unassigned codon or leverages suppression of cognate codons to incorporate selenocysteine(s) into a growing polypeptide. The tRNA molecule is a selenocysteine tRNA with an anticodon that corresponds to the unassigned codon.

[0019] According to another aspect of the invention an in vitro translation system comprising a constructed nucleic acid molecule and a tRNA molecule is provided. The constructed nucleic acid molecule encodes a variant form of a monoclonal antibody which comprises a VL chain. Positions 23 and 88 of the VL chain are substituted with selenocysteine residues. The monoclonal antibody comprises a VH chain, and positions 22 and 92 of the VH chain are substituted with selenocysteine residues. The constructed nucleic acid molecule comprises at least a pair of cysteine codons that has been replaced with an unassigned codon in the nucleic acid. The tRNA molecule is a selenocysteine tRNA with an anticodon that is complementary to the unassigned codon.

[0020] According to yet another aspect of the invention a method is provided for producing a variant form of a protein. The protein has a disulfide bond between cysteine residues, wherein the variant form has a diselenide bond between selenocysteine residues. A constructed nucleic acid sequence encoding the variant form of the protein is translated. The constructed nucleic acid sequence comprises a pair of cysteine codons that has been replaced with an unassigned codon. The variant form comprises a sequence selected from the group consisting of SEQ ID NO: 1-1631 and sequences that are at least 80% identical to said sequence. The variant form may comprise a sequence selected from the group consisting of SEQ ID NO: 1-1630 and sequences that are at least 80% identical to said sequence. The variant form may comprise a sequence of SEQ ID NO: 1631 and sequences that are at least 80% identical to said sequence. The step of translating employs a selenocysteine tRNA with a corresponding anticodon to the unassigned codon.

[0021] According to one aspect of the invention a method of testing a sample is provided. A sample is contacted with a variant form of a protein to form a reaction mixture. The protein has a disulfide bond between cysteine residues. The variant form has a diselenide bond between selenocysteine residues in place of the disulfide bond between cysteine residues. The variant form comprises a sequence selected from the group consisting of SEQ ID NO: 1-1631 and sequences that are at least 80% identical to said sequence. The variant form may comprise a sequence selected from the group consisting of SEQ ID NO: 1-1630 and sequences that are at least 80% identical to said sequence. The variant form may comprise a sequence of SEQ ID NO: 1631 and sequences that are at least 80% identical to said sequence. The reaction mixture is tested to detect a specific binding partner bound to the variant form of the protein.

[0022] According to another aspect of the invention a method is provided for testing a sample. A sample is contacted with a variant form of a monoclonal antibody to form a reaction mixture. The monoclonal antibody has a disulfide bond between cysteine residues. The variant form has a diselenide bond between selenocysteine residues in place of the disulfide bond between cysteine residues. The monoclonal antibody comprises a VL chain, and positions 23 and 88 of the VL chain are substituted with selenocysteine residues. The monoclonal antibody comprises a VH chain and positions 22 and 92 of the VH chain are substituted with selenocysteine residues. The reaction mixture is tested to detect a specific binding partner bound to the variant form of the protein.

[0023] According to yet another aspect of the invention a modified antibody is provided. It comprises at least one diselenide bond.

[0024] According to one aspect of the invention a modified insulin protein is provided. It comprises an A chain having residues 90-110 of SEQ ID NO: 1630 with at least one cysteine to selenocysteine substitution; a B chain having residues 25-54 of SEQ ID NO: 1630 with at least one cysteine to selenocysteine substitution; and at least one diselenide bridge between the A chain and the B chain.

[0025] Another aspect of the invention is a modified human insulin protein comprising at least two selenocysteine residues replacing two cysteine residues in a native human insulin protein. It has at least one diselenide bond between the at least two selenocysteine residues.

[0026] These and other aspects which will be apparent to those of skill in the art upon reading the specification provide the art with methods and products for treating human and animal diseases and for making and using therapeutic, diagnostic, analytical, and prophylactic agents.

### BRIEF DESCRIPTION OF THE DRAWINGS

[0027] FIG. 1 shows a comparison of properties of diselenide and disulfide bonds.

[0028] FIG. 2 shows that diselenide biologics show dramatic improvements to serum half-life over disulfides.

[0029] FIG. 3A-3B shows zoomed-in deconvoluted mass spectrum (FIG. 3A) and fragmentation sequence map (FIG. 3B) of 10 μM anti-MS2 scFv. Fragmentation spectra were deconvoluted using Xtract with a S/N threshold of 3 and analyzed using ProSight Lite. Formation of diselenide bonds is indicated by the lack of fragment ions between the marked selenocysteine (U) residues. No mass peaks corresponding to serine incorporation were detected.

[0030] FIG. 4 shows protein expression for 6 different selenobiologics. Sequences 1-6 on the gel correspond to SEQ ID NO: 1620-1625 in the Sequence Listing. Diselenide bonds are at: SEQ ID NO: 1620 SeCys23-SeCys97 and SeCys138-SeCys192; SEQ ID NO: 1621 SeCys23-SeCys97, SeCys138-SeCys192, SeCys267-SeCys327, and SeCys373-SeCys431; SEQ ID NO: 1622 SeCys24-SeCys98; SEQ ID NO: 1623 SeCys24-SeCys98, SeCys164-SeCys224, and SeCys270-SeCys328; SEQ ID NO: 1624 SeCys32-SeCys92 and SeCys138-SeCys196; and SEQ ID NO: 1625 SeCys4-SeCys28 and SeCys86-SeCys92.

[0031] FIG. 5 shows protein expression for 2 different selenobiologics. Sequences 7-8 on the gel correspond to SEQ ID NO: 1626-1627 in the Sequence Listing. Diselenide bonds are at SEQ ID NO: 1626 SeCys183-SeCys190, SeCys210-SeCys234, and SeCys298; and SEQ ID NO: 1627 SeCys183-SeCys190, SeCys238-SeCys298, and SeCys344-SeCys402

[0032] FIG. 6 shows protein expression for 2 different selenobiologics. Sequences 9-10 on the gel correspond to SEQ ID NO: 1628-1629 in the Sequence Listing. Diselenide bonds are at SEQ ID NO: 1628 SeCys54-SeCys166 and SeCys183-SeCys190; and SEQ ID NO: 1629 SeCys24-SeCys89 and SeCys149-SeCys244.

[0033] FIG. 7A-7B shows ELISA data for wild-type (disulfide) and seleno (diselenide) anti-RCA scFv in different redox conditions. Wild-type (A) and seleno (SEQ ID NO:1631, B) -anti-RCA scFv were diluted to 1 μM in TBS pH 7.5 with 0, 1, 10 or 50 mM DTT and incubated for 16 hours at 37° C. Ricin A-chain (Sigma L9514) was diluted to 10 μg·mL in PBS and bound to a 96-well plate overnight at 4° C. Control plates were bound with PBS containing 5% w/v skim milk. Plates were washed with PBS and blocked with PBS 5% w/v skim milk for two hours. Following incubation with DTT, scFvs were diluted in PBS with 5% w/v skim milk and 0.05% Tween 20 to 0, 0.25, 0.5, 1, 1.5, 2, 4, 6, 8, 10, 15 and 20 nM and bound in quadruplicate for two hours at 25° C. Secondary antibody (anti-polyhistidine-HRP, Sigma A7058) was diluted 1/10,000 in PBS with 5% w/v skim milk and 0.05% Tween 20 and bound for two hours at 25° C. Plates were incubated with TMB for 10 minutes at 25° C. with agitation and color development terminated by the addition of 2 M H2SO4. Absorbance was immediately measured at 450 nm. All binding, blocking and enzymatic steps were performed on an orbital shaker at 450 rpm, and all washes were performed with PBS or PBS with 0.05% Tween 20. Only wild-type anti-RCA scFv showed substantial loss of binding at 1 and 10 mM DTT, and loss of binding was substantially abrogated at all concentrations for seleno-anti-RCA compared to WT scFv.

[0034] FIG. 8A-8B shows thermal shift data for wild-type (disulfide) and seleno (diselenide) variants of 2 different biologics. Thermal denaturation of purified wild-type and seleno (SEQ ID NO: 1132) hGH (A) and wild-type and seleno (SEQ ID NO: 1629) Herceptin scFv (B) in different reducing conditions was monitored using the Applied Biosystems Protein Thermal Shift dye on a QuantStudio 3 Real Time PCR system. The reducing agent DTT was added to triplicates of 5 μg of hGH-Cys/SeCys and 2 μg of Herceptin scFv-Cys/SeCys at concentrations of 0 M and 10 mM followed by incubation for 10 minutes at room temperature. The proteins were denatured in a linear ramp of 0.03° C./s from 25° C. to 98° C. Melting temperature (Tₘ) was determined by finding the minimum of dF/dT with Protein Thermal Shift Software (ThermoFisher). The hGH samples (A) showed a single minimum at both concentrations of DTT. The Tₘ for hGH-Cys decreased from 77° C. without DTT to 60° C. in the presence of 10 mM DTT. The SeCys variant showed a marked stabilization under reducing conditions compared to the Cys variant, with a Tₘ of 75° C. without DTT and a Tₘ of 66° C. in 10 mM DTT. For Herceptin (B) the Cys variant showed two minima of dF/dT in both conditions. With addition of 10 mM DTT the dominant Tₘ minima shifted from the minima at a higher temperature (70° C.) to the lower temperature (58° C.). In contrast, Herceptin-SeCys only had one minimum in both concentrations of DTT. Again, the SeCys variant showed stabilization under reducing conditions, with the Tₘ decreasing from 68 C without DTT to 64 C in 10 mM DTT.

### DETAILED DESCRIPTION OF THE INVENTION

[0035] A sequence listing forms part of the disclosure of this application and is incorporated as part of the disclosure.

[0036] The inventors have developed polypeptides and methods to produce polypeptides in genomically recoded organisms (GRO) that fold into biologics that are stabilized by diselenide bonds between selenocysteine amino acids. Whereas disulfide bonds between cysteine amino acids have a redox potential of about −220 mV, diselenide bonds have a redox potential of about −380 mV. Since the bacterial cytosol typically has a redox potential of about −280 to −300 mV, diselenides but not disulfides avoid reduction so that they form and persist in the cytosol. Since diselenides have the same geometric bond angles and torsions as disulfides, as well as very similar bond lengths, they can be substituted into polypeptides without disrupting the three dimensional structure of the polypeptide (FIG. 1). Further, since intended in vivo environments like blood contain reducing agents like glutathione, albumin, and thioredoxin, disulfides in polypeptides can be reduced, causing the polypeptide to unfold and, in the case of multiple disulfides, “scramble” the disulfides so that incorrect cysteines are are bonded to each other. Both of these result in abrogation of the intended biological activity of the polypeptide. The lower redox potential of diselenides renders them resistant to reduction when exposed to blood serum or purified reducing components of blood serum (FIG. 2), endowing them with a longer blood serum half-life than disulfide-bearing counterparts (Muttenhaler et al.).

[0037] While peptides bearing diselenide-forming selenocysteines may be produced in vitro by solid phase peptide synthesis (Armishaw et al., Safavi-Hemami et al.), the process does not scale tractably to the yields necessary for therapeutic applications, particularly for proteins. However, in vivo production of recombinant seleno-proteins is limited by strict sequence requirements on where selenocysteine may appear in proteins. In particular, a selenocysteine insertion sequence (SECIS) element must appear in the coding DNA sequence at the selenocysteine incorporation site in order to recruit endogenous selenocysteine translation machinery, composed of specialized enzymes (selA, selD), tRNA (selC), and an elongation factor (selB). Instead, we use a recoded strain of E. coli, which has an unassigned codon, such as an amber stop codon, together with an engineered selenocysteine tRNA with an anti-amber anticodon that permits targeted placement of selenocysteine into polypeptides by introduction of the amber stop codon into the corresponding DNA coding sequence. Typically, recoding entails removing all naturally occurring instances of the unassigned codon from the genome, as well as removing or otherwise deactivating the translational machinery associated with the unassigned codon (e.g., for amber, removing or deactivating Release Factor 1). The modified tRNA interacts with the endogenous elongation factor EF-Tu. Other codons can be recoded, typically rare codons, as is known in the art. See, Ostrov et al., Science, 353:819-822, 2016. A codon on an mRNA and an anti-codon on a tRNA are typically triplets of complementary base sequences.

[0038] Recoded proteins may be synthesized in bacteria, such as E. coli cells, or in vitro, in translation or linked transcription-translation systems. Genes or mRNA encoding such recoded proteins are non-naturally occurring, and are variants of naturally occurring coding sequences.

[0039] Although many of the proteins that we show in the associated sequence listing have all cysteine residues which participate in disulfide bonds replaced with selenocysteine residues, all cysteine residues need not be replaced to gain the benefits of the substitution. Even one diselenide bond may improve the stability of a protein. Any number of diselenide bonds (selenocysteine pairs) may be substituted for disulfide bonds in the proteins. If a protein has N disulfide bonds, the protein may have anywhere from N, N minus 1, N minus 2, N minus 3, N minus 4, . . . down to 1 such bond. Proteins with different combinations of diselenide bonds and disulfides are shown in SEQ ID NO: 1220 to 1631. It is also possible to form a bond between cysteine and selenocysteine residues called a selenylsulfide. This bond has a lower redox potential (˜270 mv) than a disulfide (−220 mv) but not than bacterial cytoplasm (−280 mv). The selenylsulfide bond may be used to increase resistance to reduction in certain redox environments. Selenylsulfides may be used in place of diselenides using methods described here by substituting selenocysteine for a single disulfide bonded cysteine, or by substituting cysteine for a single diselenide bonded selenocysteine.

[0040] Sequences of disulfide-stabilized biologics with substituted selenocysteines can be produced in the cytosol of E. coli using our method at the mg/L scale in standard laboratory shaker flasks, and scaled to g/L production in microbial fermenters. These sequences include therapeutic proteins, vaccines, and monoclonal antibodies, antibody antibody fragments, antibody conjugates, and other immunoglobulin-like molecules. The Fv domains may be combined with any human Fc domains. Further, any Fv domain may be produced in our system by substituting selenocysteine for cysteine at positions 23 and 88 using Kabat numbering in the variable light chain and/or by substituting selenocysteine for cysteine at positions 22 and 92 using Kabat numbering in the variable heavy chain. Immunoglobulin classes IgG, IgA, IgM, IgD and IgE (including IgA1, IgA2, IgG1, IgG2, IgG3, and IgG4 subclasses) may be produced by these methods as typified classes, with any constant variant therein combined with either the Ig kappa or lambda constant light chain variants known to those in the art. Any selenocysteine in the disclosed sequences may be maintained as a cysteine so long as the presence of the cysteine does not interfere with the expression, folding, or intended function of the polypeptide. We disclose methods below for producing and verifying the presence of selenocysteines participating in the intended diselenide bonds for antibody single chain variable fragments (scFv, FIGS. 3, 6), human growth growth hormone (hGH, FIG. 6), PD-L1 (FIG. 4), variants of human Fc (FIG. 4), and fusions of PD-L1 and hGH to variants of human Fc (FIGS. 4 and 5), but these methods also apply to full monoclonal antibodies, other antibody fragments, antibody conjugates, other therapeutic proteins, and vaccines.

[0041] Therapeutic, diagnostic, biosensing, and prophylactic biologics may be made and used according to the invention with diselenide bonds between two selenocysteine residues. This technique and modification may be useful for any protein biologic, including but not limited to hormones (e.g., human growth hormone, FIG. 8), antibodies and antibody fragments (FIGS. 7 and 8), cytokines, growth factors, structural proteins, and the like. Insulin products, such as Lantus™, Novorapid™, Humalog™, Humulin™, Levemir™, Apidra™, and Tresiba™ may be useful with such modifications, as shown in SEQ ID NO: 1142-1155. The A chains of these insulin products can be modified as shown in SEQ ID NO: 1142, 1144, 1146, 1148, 1150, 1152, and 1154. The B chains of these insulin products can be modified as shown in SEQ ID NO: 1143, 1145, 1147, 1149, 1151, 1153, and 1155. The diselenide bonds may be intramolecular or intermolecular. Additional proteins that are suitable for such modifications include Programmed death-ligand 1 (PD-L1), PD-L1 fusion protein to an antibody domain(s), portions of PD-L1, such as the binding domain whether fused or unfused to an antibody domain(s), antibody domain(s), human growth hormone whether fused or unfused to an antibody domain(s), and Herceptin (FIGS. 4-8). This is not intended to be an exhaustive list of proteins that can be so modified.

[0042] Although particular exemplary proteins are shown with a particular sequence in the sequence listing, which forms part of this disclosure, these sequences need not be used used and reproduced with total fidelity. As is known in the art, slight modifications to proteins including allelic variations and polymorphisms may occur in parts of proteins that are not detrimental to their use and function. Thus useful proteins according to the present invention may have the precise sequences which are shown in the sequence listing or they may be slightly different. For example, useful proteins may be at least 99 percent, at least 98 percent, at least 97 percent, at least 96 percent, at least 95 percent, at least 94 percent, at least 93 percent, at least 92 percent, at least 91 percent, at least 90 percent, at least 89 percent, at least 88 percent, at least 87 percent, at least 86 percent, at least 85 percent, at least 84 percent, at least 83 percent, at least 82 percent, 81 percent, or at least 80 percent identical.

[0043] The proteins that can be made according to the invention are unlimited in purpose. They can be therapeutic proteins, prophylactic proteins (such as vaccines), enzymatic proteins, endocrine proteins, signaling proteins, scaffolding proteins, diagnostic proteins, analytic proteins, etc. The diselenide bonds will generally make the proteins more stable in the presence of reducing agents.

[0044] The proteins can be made in a host cell, or in vitro, in cell-free synthetic systems. Host cells may be any that can be robustly recoded. These can be bacterial cells that have well developed genetic systems, of which E. coli is exemplary. Other bacterial species can also be used. Cell-free systems for producing the proteins may be coupled transcription/translation systems or only translation systems. A notable aspect of the methods of the invention is the use of biological syntheses rather than chemical synthesis means.

[0045] Culturing of recoded cells with the constructed nucleic acid sequences may be by any means known in the art. The culturing may be batch or continuous, in shaker flasks or in fermenters or immobilized on solid surfaces, such as small particles contained in larger vessels. Typically the culture medium will be supplemented with a source of selenium, such as Na₂SeO₃. As is known in the art, production of the desired protein variant may be under the control of an inducer or a repressor. Any such systems that are known in the art may be selected for convenience of construction and protein production.

[0046] Administration of a therapeutic, diagnostic, or prophylactic protein to a subject in need of such treatment may be by any means known in the art and suitable for the protein. These include without limitation intravenous, intramuscular, subcutaneous, intrathecal, oral, intracoronary, and intracranial deliveries. Certain proteins are appropriate for certain types of delivery, due to stability and target. Administration of a therapeutic protein can include one or more pharmaceutically acceptable carriers, such as, for example, a liquid or solid filler, diluent, excipient, buffer, stabilizer, or encapsulating material.

[0047] The above disclosure generally describes the present invention. All references disclosed herein are expressly incorporated by reference. A more complete understanding can be obtained by reference to the following specific examples which are provided herein for purposes of illustration only, and are not intended to limit the scope of the invention.

### EXAMPLE 1

### scFv Expression and Purification

[0048] RTΔA 2X310K cells transformed with plasmid pACYC-PcaU-aMS2 bearing a gene encoding an anti-alpha MS2 scFv antibody with UAG codons directing selenocysteine incorporation substituted in place of all cysteine codons were diluted 1/250 in 1 L of terrific broth supplemented with 1000 μg·mL carbenicillin, 12.5 μg·mL tetracycline and 25 μM Na₂SeO₃ and induced with (1 mM) 3,4-dihydroxybenzoic acid during mid log phase followed by growth O/N at 37° C. Cells were harvested by centrifugation at 8000× g for 10 min and resuspended in 25 mL of wash buffer (50 mM K₂HPO₄, 300 mM NaCl, 20 mM imidazole and 10% glycerol at pH 8.0) with protease inhibitor cocktail (cOmplete, mini EDTA free, Roche) and lysozyme (0.5 mg·mL⁻¹). Following a 20 min incubation at 4° C. with gentle agitation cells were lysed by sonication (Model 500, Fisher Scientific) and clarified three times by centrifugation at 35000× g for 30 min. Lysate was filtered through a 0.2 μm membrane and protein was recovered by IMAC using Ni-NTA resin and gravity flow columns. Eluate was concentrated to 3 mL and dialyzed against TBS pH 7.5 followed by purification to apparent homogeneity by size exclusion FPLC. A significant proportion of the sample precipitated during dialysis and an additional proportion of the sample was present in the less stable/soluble dimer form. Final yield of soluble aMS2 seleno-scFv monomer was 3 mg/L.

[0049] RTΔA 2X310K-T7 cells transformed with plasmid pACYC-TetO-aTNF bearing a gene encoding an anti-TNF (tumor necrosis factor) scFv antibody with UAG codons directing selenocysteine incorporation substituted in place of all cysteine codons were diluted 1/250 in 1 L of terrific broth supplemented with 1000 μg·mL carbenicillin, 33 μg·mL chloramphenicol and 25 μM Na₂SeO₃ and induced with 200 ngμmL anhydrotetracycline during mid log phase followed by growth O/N at 30° C. Cell were harvested and purified by IMAC as previously described. To reduce precipitation, samples were dialysed in larger volumes (>6 mL). Protein samples were purified to homogeneity by either size exclusion FPLC or anion exchange chromatography (HiTrap Q HP column). Anti-RCA, anti-GM-CSF, and anti-interferon gamma seleno-scFvs were purified by the same procedure. Final yield of soluble seleno-scFv monomers ranged between 0.5-1 mg/L.

### EXAMPLE 2

### Mass Spectrometry

[0050] Intact protein samples were analyzed using methods described previously. Selenoprotein samples were buffer exchanged into LC-MS grade water using 10 kDa molecular weight cut-off filters. Once the buffer exchange was complete the samples were diluted to 20 μM in a methanol/water/formic acid (50/49/1) solution. After dilution, protein solutions were infused into an Orbitrap Elite mass spectrometer (Thermo Fisher Scientific Instruments, Bremen, Germany) at a rate of 3 L·min⁻¹ via electrospray ionization. In order to confirm the incorporation of selenocysteine, intact mass analysis was carried out at 240k resolution and averaging 20 scans. Characterization of the protein sequences was undertaken by ultraviolet photodissociation (UVPD) using a 193 nm excimer laser (Coherent, Inc.) which was interfaced to the Orbitrap mass spectrometer as described previously. For each UVPD spectrum, two laser pulses of 2.5 mJ were used and 250 scans were averaged. MS1 spectra were deconvoluted using the Xtract deconvolution algorithm (Thermo Fisher Scientific). UVPD mass spectra were also deconvoluted using Xtract and then analyzed using ProsightPC 3.0. Proteins containing selenocysteine were searched by adding a modification of 61.9146 Da to serine residues at the four incorporation sites (including the subtraction of one hydrogen atom due to formation of diselenide bonds). Incorporation efficiencies were calculated by dividing the area of the modified modified protein peak by the summed areas of the unmodified protein peak and the modified protein peak. The peak area used for each protein was the sum of the integrated areas of the five most abundant peaks from each isotope cluster.

### EXAMPLE 3

### UAG Genomically Recoded Organism Suitable for Expressing Polypeptides with Non-Standard Amino Acids

[0051] A Genomically Recoded Organism (GRO) in which the UAG codon translational function is completely removed is used to unambiguously incorporate non-standard amino acids (NSAAs) at UAG. See Lajoie, M. J. et al. Genomically recoded organisms expand biological functions. Science 342, 357-360, doi:10.1126/science.1241459 (2013), incorporated by reference in its entirety. A genomically recoded organism may include one or more reassigned triplet codons to facilitate the incorporation of non-standard amino acids (NSAAa), such as selenocysteine. Triplet codons can be reassigned to incorporate non-standard amino acids, such as selenocysteine, using methods known to those of skill in then art. See Lajoie, M. J. et al. Probing the limits of genetic recoding in essential genes. Science 342, 361-363, doi:10.1126/science.1241460 (2013), incorporated by reference in its entirety. See also Thyer, R. et al. Evolving tRNA^{Sec} for Efficient Canonical Incorporation of Selenocysteine. JACS 137(1), 46-49, (2015), incorporated by reference in its entirety. See also Ostrov, et al. Design, synthesis, and testing toward a 57-codon genome, Science 353, 819-822, 2016. Alternatively, quadruplet codons can be used to incorporate non-standard amino acids, using methods known to those of skill in the art. See Anderson, J. C. et al. An expanded genetic code with a functional quadruplet codon. Proc. Natl. Acad. Sci. U. S. A. 101, 7566-7571, doi:10.1073/pnas.0401517101 (2004), Neumann, H., Wang, K., Davis, L., Garcia-Alai, M. & Chin, J. W. Encoding multiple unnatural amino acids via evolution of a quadruplet-decoding ribosome. Nature 464, 441-444, (2010) and Chatterjee, A., Lajoie, M. J., Xiao, H., Church, G. M. & Schultz, P. G. A Bacterial Strain with a Unique Quadruplet Codon Specifying Non-native Amino Acids. Chembiochem, n/a-n/a, doi:10.1002/cbic.201402104 (2014) each of which are incorporated by reference in their entireties. An orthogonal aminoacyl-tRNA synthetase (aaRS)/tRNA pair is developed that specifically and efficiently decodes the quadruplet UAGA codon based based on the non-functional UAG triplet resulting in unambiguous incorporation of non-standard amino acids, such as selenocysteine, at UAGA codons producing high protein yields. Such quadruplet codons may be used in the present methods.

[0052] Over 100 NSAAs with diverse chemistries have been synthesized and co-translationally incorporated into proteins using evolved orthogonal aminoacyl-tRNA synthetase (aaRSs)/tRNA pairs. See Liu, C. C. & Schultz, P. G. Adding new chemistries to the genetic code. An. Rev. Biochem. 79, 413-444, doi:10.1146/annurev.biochem.052308.105824 (2010), incorporated by refernece in its entirety. Non-standard amino acids have been designed based on tyrosine or pyrrolysine. An aaRS/tRNA may be provided on a plasmid or into the genome of the genomically recoded organism. An orthogonal aaRS/tRNA pair is used to bioorthogonally incorporate NSAAs into proteins. Vector-based over-expression systems may be used to outcompete natural codon function with its reassigned function. See Wang, L., Brock, A., Herberich, B. & Schultz, P. G. Expanding the genetic code of Escherichia coli. Science 292, 498-500 (2001), Young, T. S., Ahmad, I., Yin, J. A. & Schultz, P. G. An enhanced system for unnatural amino acid mutagenesis in E. coli. Journal of Molecular Biology 395, 361-374 (2009), and Chatterjee, A., Sun, S. B., Furman, J. L., Xiao, H. & Schultz, P. G. A Versatile

[0053] Platform for Single- and Multiple-Unnatural Amino Acid Mutagenesis in Escherichia coli. Biochemistry 52, 1828-1837, doi:10.1021/bi4000244 (2013) each of which are incorporated by reference in their entireties. If one completely abolishes natural UAG translation function, far lower aaRS/tRNA function may be sufficient to achieve efficient NSAA incorporation. GRO-based NSAA incorporation can use either vector- and/or genome-based aaRS/tRNA pairs. Genome-based aaRS/tRNA pairs have been used to reduce the mis-incorporation of canonical amino acids in the absence of available NSAAs (Mandell and Lajoie et al., Nature. 2015 Feb 5;518(7537):55-60. doi: 10.1038/nature14121, which is incorporated by reference).

[0054] Since the UAG codon function has been completely reassigned in the genomically recoded organism, NSAAs, such as selenocysteine, can be incorporated in the genomically recoded organism without any phenotypic consequences. NSAA incorporation in the genomically recoded organism may involve supplementing the growth media with the non-standard amino acid, such as selenocysteine, and an inducer for the aaRS. Alternatively, the aaRS may be expressed constitutively. Alternatively, as in the present disclosure, the endogenous seryl-tRNA synthetase may may be used to serylate selenocysteine tRNA, which tRNA is acted upon by enzymes comprising selA and selD to produce tRNA^{sec} (selenocysteine charged tRNA). Media may be supplemented with a selenium source like sodium selenite to improve production of tRNA^{sec}. The desired protein can be overexpressed using any desired protein overexpression system (e.g., T7-RNAP, constitutive incorporation, or inducible expression based on IPTG/allolactose, anhydrotetracycline, arabinose, rhamnose, or other inducible systems). The protein cross-link (diselenide bond) may form spontaneously based on proximity and orientation during protein folding, and the the protein can be handled as any other over-expressed product.

### EXAMPLE 4

### Methods

[0055] Sequences coding for the genes of interest were cloned into a chloramphenicol resistant vector with a T7 promoter controlled by a Tet-repressor. Vectors were transformed into 2×310k cells with an integrated T7 RNA Polymerase controlled by a tet operon. Cells were grown to an OD ˜0.6 and induced with aTc at 100 ng/mL at room temperature overnight. Induced cells were pelleted and resuspended in 20 mM Tris pH 7.4, 100 mM NaCl, 20 mM imidazole, and 0.01% Triton X-100 followed by lysis by sonication. The lysates were centrifuged to separate and pellet. Supernate was run over Ni-affinity beads in the same buffer as lysis. Proteins of interest were eluted in PBS pH7.4 with addition of 300 mM imidazole. Purified fractions were run on a SDS page gel. The results for 10 different selenobiologics are shown in FIGS. 4-6.

### REFERENCES

[0056] The disclosure of each reference cited is expressly incorporated herein.

[0057] 1. Anderson, J. C. et al. An expanded genetic code with a functional quadruplet codon. Proc. Natl. Acad. Sci. U S. A. 101, 7566-7571, doi:10.1073/pnas.0401517101 (2004),

[0058] 2. Armishaw, C. J., Daly, N. L., Nevin, S. T., Adams, D. J., Craik, D. J. & Alewood, P. F. Alpha-selenoconotoxins, a new class of potent alpha7 neuronal nicotinic receptor antagonists. J Biol Chem 281, 14136-43 (2006).

[0059] 3. Chatterjee, A., Lajoie, M. J., Xiao, H., Church, G. M. & Schultz, P. G. A Bacterial Strain with a Unique Quadruplet Codon Specifying Non-native Amino Acids. Chembiochem, n/a-n/a, doi:10.1002/cbic.201402104 (2014)

[0060] 4. Chatterjee, A., Sun, S. B., Furman, J. L., Xiao, H. & Schultz, P. G. A Versatile Platform for Single- and Multiple-Unnatural Amino Acid Mutagenesis in Escherichia coli. Biochemistry 52, 1828-1837, doi:10.1021/bi4000244 (2013)

[0061] 5. Lajoie, M. J. et al. Genomically recoded organisms expand biological functions. Science 342, 357-360, doi:10.1126/science.1241459 (2013)

[0062] 6. Lajoie, M. J. et al. Probing the limits of genetic recoding in essential genes. Science 342, 361-363, doi:10.1126/science.1241460 (2013)

[0063] 7. Liu, C. C. & Schultz, P. G. Adding new chemistries to the genetic code. An. Rev. Biochem. 79, 413-444, doi:10.1146/annurev.biochem.052308.105824 (2010)

[0064] 8. Mandell and Lajoie et al., Nature. 2015 Feb 5;518(7537):55-60. doi: 10.1038/nature14121,

[0065] 9. Muttenthaler, M., Andersson, A., de Araujo, A. D., Dekan, Z., Lewis, R. J. & Alewood, P. F. Modulating oxytocin activity and plasma stability by disulfide bond engineering. J Med Chem 53, 8585-96 (2010).

[0066] 10. Neumann, H., Wang, K., Davis, L., Garcia-Alai, M. & Chin, J. W. Encoding multiple unnatural amino acids via evolution of a quadruplet-decoding ribosome. Nature 464, 441-444, (2010)

[0067] 11. Ostrov, et al. Design, synthesis, and testing toward a 57-codon genome, Science 353, 819-822, 2016

[0068] 12. Safavi-Hemami, H., Gajewiak, J., Karanth, S., Robinson, S. D., Ueberheide, B., Douglass, A. D., Schlegel, A., Imperial, J. S., Watkins, M., Bandyopadhyay, P. K., Yandell, M., Li, Q., Purcell, A. W., Norton, R. S., Ellgaard, L. & Olivera, B. M. Specialized insulin is used for chemical warfare by fish-hunting cone snails. Proc Natl Natl Acad Sci USA 112, 1743-8 (2015).

[0069] 13. Thyer, R. et al. Evolving tRNA^{Sec} for Efficient Canonical Incorporation of Selenocysteine. JACS 137(1), 46-49, (2015)

[0070] 14. Wang, L., Brock, A., Herberich, B. & Schultz, P. G. Expanding the genetic code of Escherichia coli. Science 292, 498-500 (2001)

[0071] 15. Young, T. S., Ahmad, I., Yin, J. A. & Schultz, P. G. An enhanced system for unnatural amino acid mutagenesis in E. coli. Journal of Molecular Biology 395, 361-374 (2009),

The application's sequence listing, which the Patent Office published only in electronic form, follows.

SEQUENCE LISTING (1631 sequences)

SEQ ID NO: 1 - protein, 330 aa, Artificial Sequence
  Synthesized sequence with two or more selenocysteine residues substituted for two or more cysteine residues
  VARIANT (1)...(330): Xaa = selenocysteine or cysteine
ASTKGPSVFPLAPSSKSTSGGTAALGXLVKDYFPEPVTVSWNSGALTSGVHTFPAVLQSSGLYSLSSVVTVPSSSLGTQTYIXNVNHKPSNTKVDKKVEPKSXDKTHTXPPXPAPELLGGPSVFLFPPKPKDTLMISRTPEVTXVVVDVSHEDPEVKFNWYVDGVEVHNAKTKPREEQYNSTYRVVSVLTVLHQDWLNGKEYKXKVSNKALPAPIEKTISKAKGQPREPQVYTLPPSRDELTKNQVSLTXLVKGFYPSDIAVEWESNGQPENNYKTTPPVLDSDGSFFLYSKLTVDKSRWQQGNVFSXSVMHEALHNHYTQKSLSLSPGK

SEQ ID NO: 2 - protein, 326 aa, Artificial Sequence
  Synthesized sequence with two or more selenocysteine residues substituted for two or more cysteine residues
  VARIANT (1)...(326): Xaa = selenocysteine or cysteine
ASTKGPSVFPLAPXSRSTSESTAALGXLVKDYFPEPVTVSWNSGALTSGVHTFPAVLQSSGLYSLSSVVTVPSSNFGTQTYTXNVDHKPSNTKVDKTVERKXXVEXPPXPAPPVAGPSVFLFPPKPKDTLMISRTPEVTXVVVDVSHEDPEVQFNWYVDGVEVHNAKTKPREEQFNSTFRVVSVLTVVHQDWLNGKEYKXKVSNKGLPAPIEKTISKTKGQPREPQVYTLPPSREEMTKNQVSLTXLVKGFYPSDISVEWESNGQPENNYKTTPPMLDSDGSFFLYSKLTVDKSRWQQGNVFSXSVMHEALHNHYTQKSLSLSPGK

SEQ ID NO: 3 - protein, 377 aa, Artificial Sequence
  Synthesized sequence with two or more selenocysteine residues substituted for two or more cysteine residues
  VARIANT (1)...(377): Xaa = selenocysteine or cysteine
ASTKGPSVFPLAPXSRSTSGGTAALGXLVKDYFPEPVTVSWNSGALTSGVHTFPAVLQSSGLYSLSSVVTVPSSSLGTQTYTXNVNHKPSNTKVDKRVELKTPLGDTTHTXPRXPEPKSXDTPPPXPRXPEPKSXDTPPPXPRXPEPKSXDTPPPXPRXPAPELLGGPSVFLFPPKPKDTLMISRTPEVTXVVVDVSHEDPEVQFKWYVDGVEVHNAKTKPREEQYNSTFRVVSVLTVLHQDWLNGKEYKXKVSNKALPAPIEKTISKTKGQPREPQVYTLPPSREEMTKNQVSLTXLVKGFYPSDIAVEWESSGQPENNYNTTPPMLDSDGSFFLYSKLTVDKSRWQQGNIFSXSVMHEALHNRFTQKSLSLSPGK

SEQ ID NO: 4 - protein, 327 aa, Artificial Sequence
  Synthesized sequence with two or more selenocysteine residues substituted for two or more cysteine residues
  VARIANT (1)...(327): Xaa = selenocysteine or cysteine
ASTKGPSVFPLAPXSRSTSESTAALGXLVKDYFPEPVTVSWNSGALTSGVHTFPAVLQSSGLYSLSSVVTVPSSSLGTKTYTXNVDHKPSNTKVDKRVESKYGPPXPSXPAPEFLGGPSVFLFPPKPKDTLMISRTPEVTXVVVDVSQEDPEVQFNWYVDGVEVHNAKTKPREEQFNSTYRVVSVLTVLHQDWLNGKEYKXKVSNKGLPSSIEKTISKAKGQPREPQVYTLPPSQEEMTKNQVSLTXLVKGFYPSDIAVEWESNGQPENNYKTTPPVLDSDGSFFLYSRLTVDKSRWQEGNVFSXSVMHEALHNHYTQKSLSLSLGK

SEQ ID NO: 5 - protein, 353 aa, Artificial Sequence
  Synthesized sequence with two or more selenocysteine residues substituted for two or more cysteine residues
  VARIANT (1)...(353): Xaa = selenocysteine or cysteine
ASPTSPKVFPLSLXSTQPDGNVVIAXLVQGFFPQEPLSVTWSESGQGVTARNFPPSQDASGDLYTTSSQLTLPATQXLAGKSVTXHVKHYTNPSQDVTVPXPVPSTPPTPSPSTPPTPSPSXXHPRLSLHRPALEDLLLGSEANLTXTLTGLRDASGVTFTWTPSSGKSAVQGPPERDLXGXYSVSSVLPGXAEPWNHGKTFTXTAAYPESKTPLTATLSKSGNTFRPEVHLLPPPSEELALNELVTLTXLARGFSPKDVLVRWLQGSQELPREKYLTWASRQEPSQGTTTFAVTSILRVAAEDWKKGDTFSXMVGHEALPLAFTQKTIDRLAGKPTHVNVSVVMAEVDGTXY

SEQ ID NO: 6 - protein, 340 aa, Artificial Sequence
  Synthesized sequence with two or more selenocysteine residues substituted for two or more cysteine residues
  VARIANT (1)...(340): Xaa = selenocysteine or cysteine
ASPTSPKVFPLSLDSTPQDGNVVVAXLVQGFFPQEPLSVTWSESGQNVTARNFPPSQDASGDLYTTSSQLTLPATQXPDGKSVTXHVKHYTNPSQDVTVPXPVPPPPPXXHPRLSLHRPALEDLLLGSEANLTXTLTGLRDASGATFTWTPSSGKSAVQGPPERDLXGXYSVSSVLPGXAQPWNHGETFTXTAAHPELKTPLTANITKSGNTFRPEVHLLPPPSEELALNELVTLTXLARGFSPKDVLVRWLQGSQELPREKYLTWASRQEPSQGTTTFAVTSILRVAAEDWKKGDTFSXMVGHEALPLAFTQKTIDRMAGKPTHVNVSVVMAEVDGTXY

SEQ ID NO: 7 - protein, 473 aa, Artificial Sequence
  Synthesized sequence with two or more selenocysteine residues substituted for two or more cysteine residues
  VARIANT (1)...(473): Xaa = selenocysteine or cysteine
GSASAPTLFPLVSXENSPSDTSSVAVGXLAQDFLPDSITLSWKYKNNSDISSTRGFPSVLRGGKYAATSQVLLPSKDVMQGTDEHVVXKVQHPNGNKEKNVPLPVIAELPPKVSVFVPPRDGFFGNPRKSKLIXQATGFSPRQIQVSWLREGKQVGSGVTTDQVQAEAKESGPTTYKVTSTLTIKESDWLGQSMFTXRVDHRGLTFQQNASSMXVPDQDTAIRVFAIPPSFASIFLTKSTKLTXLVTDLTTYDSVTISWTRQNGEAVKTHTNISESHPNATFSAVGEASIXEDDWNSGERFTXTVTHTDLPSPLKQTISRPKGVALHRPDVYLLPPAREQLNLRESATITXLVTGFSPADVFVQWMQRGQPLSPEKYVTSAPMPEPQAPGRYFAHSILTVSEEEWNTGETYTXVAHEALPNRVTERTVDKSTEGEVSADEEGFENLWATASTFIVLFLLSLFYSTTVTLFKVK

SEQ ID NO: 8 - protein, 430 aa, Artificial Sequence
  Synthesized sequence with two or more selenocysteine residues substituted for two or more cysteine residues
  VARIANT (1)...(430): Xaa = selenocysteine or cysteine
APTKAPDVFPIISGXRHPKDNSPVVLAXLITGYHPTSVTVTWYMGTQSQPQRTFPEIQRRDSYYMTSSQLSTPLQQWRQGEYKXVVQHTASKSKKEIFRWPESPKAQASSVPTAQPQAEGSLAKATTAPATTRNTGRGGEEKKKEKEKEEQEERETKTPEXPSHTQPLGVYLLTPAVQDLWLRDKATFTXFVVGSDLKDAHLTWEVAGKVPTGGVEEGLLERHSNGSQSQHSRLTLPRSLWNAGTSVTXTLNHPSLPPQRLMALREPAAQAPVKLSLNLLASSDPPEAASWLLXEVSGFSPPNILLMWLEDQREVNTSGFAPARPPPQPGSTTFWAWSVLRVPAPPSPQPATYTXVVSHEDSRTLLNASRSLEVSYLAMTPLIPQSKDENSDDYTTFDDVGSLWTTLSTFVALFILTLLYSGIVTFIKVK

SEQ ID NO: 9 - protein, 428 aa, Artificial Sequence
  Synthesized sequence with two or more selenocysteine residues substituted for two or more cysteine residues
  VARIANT (1)...(428): Xaa = selenocysteine or cysteine
ASTQSPSVFPLTRXXKNIPSNATSVTLGXLATGYFPEPVMVTWDTGSLNGTTMTLPATTLTLSGHYATISLLTVSGAWAKQMFTXRVAHTPSSTDWVDNKTFSVXSRDFTPPTVKILQSSXDGGGHFPPTIQLLXLVSGYTPGTINITWLEDGQVMDVDLSTASTTQEGELASTQSELTLSQKHWLSDRTYTXQVTYQGHTFEDSTKKXADSNPRGVSAYLSRPSPFDLFIRKSPTITXLVVDLAPSKGTVNLTWSRASGKPVNHSTRKEEKQRNGTLTVTSTLPVGTRDWIEGETYQXRVTHPHLPRALMRSTTKTSGPRAAPEVYAFATPEWPGSRDKRTLAXLIQNFMPEDISVQWLHNEVQLPDARHSTTQPRKTKGSGFFVFSRLEVTRAEWEQKDEFIXRAVHEAASPSQTVQRAVSVNPGK

SEQ ID NO: 10 - protein, 106 aa, Artificial Sequence
  Synthesized sequence with two or more selenocysteine residues substituted for two or more cysteine residues
  VARIANT (1)...(106): Xaa = selenocysteine or cysteine
TVAAPSVFIFPPSDEQLKSGTASVVXLLNNFYPREAKVQWKVDNALQSGNSQESVTEQDSKDSTYSLSSTLTLSKADYEKHKVYAXEVTHQGLSSPVTKSFNRGEX

SEQ ID NO: 11 - protein, 106 aa, Artificial Sequence
  Synthesized sequence with two or more selenocysteine residues substituted for two or more cysteine residues
  VARIANT (1)...(106): Xaa = selenocysteine or cysteine
GQPKANPTVTLFPPSSEELQANKATLVXLISDFYPGAVTVAWKADGSPVKAGVETTKPSKQSNNKYAASSYLSLTPEQWKSHRSYSXQVTHEGSTVEKTVAPTEXS

SEQ ID NO: 12 - protein, 106 aa, Artificial Sequence
  Synthesized sequence with two or more selenocysteine residues substituted for two or more cysteine residues
  VARIANT (1)...(106): Xaa = selenocysteine or cysteine
GQPKAAPSVTLFPPSSEELQANKATLVXLISDFYPGAVTVAWKADSSPVKAGVETTTPSKQSNNKYAASSYLSLTPEQWKSHRSYSXQVTHEGSTVEKTVAPTEXS

SEQ ID NO: 13 - protein, 106 aa, Artificial Sequence
  Synthesized sequence with two or more selenocysteine residues substituted for two or more cysteine residues
  VARIANT (1)...(106): Xaa = selenocysteine or cysteine
GQPKAAPSVTLFPPSSEELQANKATLVXLISDFYPGAVTVAWKADSSPAKAGVETTTPSKQSNNKYAASSYLSLTPEQWKSHKSYSXQVTHEGSTVEKTVAPTEXS

SEQ ID NO: 14 - protein, 106 aa, Artificial Sequence
  Synthesized sequence with two or more selenocysteine residues substituted for two or more cysteine residues
  VARIANT (1)...(106): Xaa = selenocysteine or cysteine
GQPKAAPSVTLFPPSSEELQANKATLVXLISDFYPGAVKVAWKADGSPVNTGVETTTPSKQSNNKYAASSYLSLTPEQWKSHRSYSXQVTHEGSTVEKTVAPAEXS

SEQ ID NO: 15 - protein, 106 aa, Artificial Sequence
  Synthesized sequence with two or more selenocysteine residues substituted for two or more cysteine residues
  VARIANT (1)...(106): Xaa = selenocysteine or cysteine
GQPKAAPSVTLFPPSSEELQANKATLVXLVSDFYPGAVTVAWKADGSPVKVGVETTKPSKQSNNKYAASSYLSLTPEQWKSHRSYSXRVTHEGSTVEKTVAPAEXS

SEQ ID NO: 16 - protein, 117 aa, Artificial Sequence
  Synthesized sequence with two or more selenocysteine residues substituted for two or more cysteine residues
  VARIANT (1)...(117): Xaa = selenocysteine or cysteine
EVMLVESGGVLVKPGGSLKLSXAASGFTFSRYAMSWVRQTPEKRLEWVATISSGGSYSYYPDSVKGRFTISRDNVKNTLYLQMSSLRSEDTAMYYXARDSGGFAYWGQGTLVTVSAA

SEQ ID NO: 17 - protein, 123 aa, Artificial Sequence
  Synthesized sequence with two or more selenocysteine residues substituted for two or more cysteine residues
  VARIANT (1)...(123): Xaa = selenocysteine or cysteine
EIQLQQSGVELVRPGASVTLSXKASGYTFTDYDMHWVKQTPVHGLEWIGTIDPETGGTAYNQKFKGKATLTADRSSTTAYMELSSLTSEDSAVYYXTSFYYTYSNYDVGFAYWGQGTLVTVSA

SEQ ID NO: 18 - protein, 123 aa, Artificial Sequence
  Synthesized sequence with two or more selenocysteine residues substituted for two or more cysteine residues
  VARIANT (1)...(123): Xaa = selenocysteine or cysteine
EVTLRESGPGLVKPTQTLTLTXTLYGFSLSTSDMGVDWIRQPPGKGLEWLAHIWWDDVKRYNPALKSRLTISKDTSKNQVVLKLTSVDPVDTATYYXARTVSSGYIYYAMDYWGQGTLVTVVS

SEQ ID NO: 19 - protein, 122 aa, Artificial Sequence
  Synthesized sequence with two or more selenocysteine residues substituted for two or more cysteine residues
  VARIANT (1)...(122): Xaa = selenocysteine or cysteine
EVQLVQSGTEVKKPGESLKISXKGSGYTVTSYWIGWVRQMPGKGLEWMGFIYPGDSETRYSPTFQGQVTISADKSFNTAFLQWSSLKASDTAMYYXARVGSGWYPYTFDIWGQGTMVTVSSA

SEQ ID NO: 20 - protein, 117 aa, Artificial Sequence
  Synthesized sequence with two or more selenocysteine residues substituted for two or more cysteine residues
  VARIANT (1)...(117): Xaa = selenocysteine or cysteine
QVQLVESGGGVVQPGRSLRLSXAASGFTFSSYGMLWVRQAPGKGLEWVADISYDGSNKYYADSVKGRFTISRDNSKNTLYLQMNSLRAEDTAVFYXARDRIAVADYWGQGTLVTVSS

SEQ ID NO: 21 - protein, 119 aa, Artificial Sequence
  Synthesized sequence with two or more selenocysteine residues substituted for two or more cysteine residues
  VARIANT (1)...(119): Xaa = selenocysteine or cysteine
QVQLVQSGAEVKKPGASVKVSXKASGYTFTNYWMHWVRQAPGQGLEWMGEINPSHGRTIYAQKFQGRVTMTRDTSTSTVYMELSSLRSEDTAVYYXARGGLGPAWFAYWGQGTLVTVSS

SEQ ID NO: 22 - protein, 119 aa, Artificial Sequence
  Synthesized sequence with two or more selenocysteine residues substituted for two or more cysteine residues
  VARIANT (1)...(119): Xaa = selenocysteine or cysteine
EVQLVQSGAEVKKPGESLKISXKVSGYFFTTYWIGWVRQMPGKGLEYMGIIYPGDSDTRYSPSFQGQVTISADKSISTAYLQWSSLKASDTAMYYXARGGNWNXFDYWGQGTLVTVSSA

SEQ ID NO: 23 - protein, 117 aa, Artificial Sequence
  Synthesized sequence with two or more selenocysteine residues substituted for two or more cysteine residues
  VARIANT (1)...(117): Xaa = selenocysteine or cysteine
EVQLVQSGAEVKKPGESLKISXKGSGYNFTSYWIGWVRQMPGKGLELMGIIYPGDSDTRYSPSFQGQVTISADKSISTAYLQWSSLKASDTAMYYXGSGSYFYFDLWGRGTLVTVSS

SEQ ID NO: 24 - protein, 120 aa, Artificial Sequence
  Synthesized sequence with two or more selenocysteine residues substituted for two or more cysteine residues
  VARIANT (1)...(120): Xaa = selenocysteine or cysteine
QVQLVESGGGVVQPGRSLRLSXAASGFSFSSTYVXWVRQAPGKGLEWIAXIYTGDGTNYSASWAKGRFTISKDSSKNTVYLQMNSLRAEDTAVYFXARPDITYGFAINFWGPGTLVTVSS

SEQ ID NO: 25 - protein, 120 aa, Artificial Sequence
  Synthesized sequence with two or more selenocysteine residues substituted for two or more cysteine residues
  VARIANT (1)...(120): Xaa = selenocysteine or cysteine
EVQLVESGGGLVQPGGSLRLSXAVSGFSLSSYYMSWVRQAPGKGLEWIGITTTSTNTFYASWAKGRFTISKDSSKNTVYLQMNSPRAEDTAVYFXARYGGNSAYYAFSLWGQGTLVTVSS

SEQ ID NO: 26 - protein, 121 aa, Artificial Sequence
  Synthesized sequence with two or more selenocysteine residues substituted for two or more cysteine residues
  VARIANT (1)...(121): Xaa = selenocysteine or cysteine
QVQLQQWGAGLLKPSETLSLTXAVYGGSFSGYYWSWVRQPPGKGLEWIGEIDHSGSTNNNPSLKSRVTISVGTSKNQFSLKLSSVTAADTAVYYXSRDGGPESGMGAFDIWGQGTMVTVSS

SEQ ID NO: 27 - protein, 127 aa, Artificial Sequence
  Synthesized sequence with two or more selenocysteine residues substituted for two or more cysteine residues
  VARIANT (1)...(127): Xaa = selenocysteine or cysteine
QVQLVQSGAEVKKPGASVKVSXKASGGTFSSYAISWVRQAPGQGLEWMGGFDPEDGETIYAQKFQGRVTMTEDTSTDTAYMELSSLRSEDTAVYYXATGRSMVRGVIIPFNGMDVWGQGTTVTVSSK

SEQ ID NO: 28 - protein, 118 aa, Artificial Sequence
  Synthesized sequence with two or more selenocysteine residues substituted for two or more cysteine residues
  VARIANT (1)...(118): Xaa = selenocysteine or cysteine
QVQLQQSGAELVGPGSSVKISXKASGYAFSSYWMNWVKQRPGQGLEWIGQIYPGDGDTNYNGKFRGKVTLTADRSSSTADMQLSSLTSEDSAVYFXARDDGYEGFDYWGQGTTLTVSS

SEQ ID NO: 29 - protein, 122 aa, Artificial Sequence
  Synthesized sequence with two or more selenocysteine residues substituted for two or more cysteine residues
  VARIANT (1)...(122): Xaa = selenocysteine or cysteine
EVKLVESGGGLVKPGGSLNISXAASGFTFSNYVMSWVRQTPEKRLEWVATISSGDNYMYYPDSVKGRFTISSDNAKNTLFLQMSSLRSEDTALYYXARHFDNYEGNSMDYWGQGTSVTVSSA

SEQ ID NO: 30 - protein, 116 aa, Artificial Sequence
  Synthesized sequence with two or more selenocysteine residues substituted for two or more cysteine residues
  VARIANT (1)...(116): Xaa = selenocysteine or cysteine
EVQLLESGGGLVQPGGSLRLSXAASGFTFSNYWMGWVRQAPGKGLEWVSYIRSSGGLTHYADSVKGRFTISRDNSKNTLYLQMNSLRAEDTATYYXAKGLYSFDYWGQGTLVTVSS

SEQ ID NO: 31 - protein, 121 aa, Artificial Sequence
  Synthesized sequence with two or more selenocysteine residues substituted for two or more cysteine residues
  VARIANT (1)...(121): Xaa = selenocysteine or cysteine
EVQLVESGGGLVQPGGSLRLSXAASGFDFSRFWMSWVRQAPGKGLEWIGEVNPDNNTMNYTPSLKDKFTLSRDNAKNTLYLQMNSLRAEDTAVYYXARPPYYGSYGGFAYWGQGTLVTVSS

SEQ ID NO: 32 - protein, 106 aa, Artificial Sequence
  Synthesized sequence with two or more selenocysteine residues substituted for two or more cysteine residues
  VARIANT (1)...(106): Xaa = selenocysteine or cysteine
GPGLAAPSQSLSITXTVSGFSLTSYVISWVRQPPGKGLEWLGVIWTGGGTNYNSALKSRLSISKDNSKSQVSLKMNSLQTDDTARYYXASLSYDGFDYWGQGTTVT

SEQ ID NO: 33 - protein, 126 aa, Artificial Sequence
  Synthesized sequence with two or more selenocysteine residues substituted for two or more cysteine residues
  VARIANT (1)...(126): Xaa = selenocysteine or cysteine
EVQLVQSGAEVKKPGESLKISXKGSGYNFISHWIGWVRQMPGKGLEWMGMIYPGDSDTRYSPSFQGQVTISADKSINTAYLQWRSLKASDTAMYFXARHGGITGTTFYYDFGMDVWGQGTTVTVSS

SEQ ID NO: 34 - protein, 115 aa, Artificial Sequence
  Synthesized sequence with two or more selenocysteine residues substituted for two or more cysteine residues
  VARIANT (1)...(115): Xaa = selenocysteine or cysteine
QVQLVQSGAELKKPGASVKVSXKASGYTFTSYWINWIRQAPGQGLEWIGRIAPGSGTTYYNEVFKGRVTITVDKSTSTAYMELSSLRSEDTAVYFXARGDYGSYWGQGTLVTVSS

SEQ ID NO: 35 - protein, 120 aa, Artificial Sequence
  Synthesized sequence with two or more selenocysteine residues substituted for two or more cysteine residues
  VARIANT (1)...(120): Xaa = selenocysteine or cysteine
QVQLQESGPGLVKPSETLSLTXTVSGGSISSYYWSWIRQPPGRGLEWIGYFFYSGYTNYNPSLKSRVTMSVDTSKNQFSLKLSSVTAADTAVYYXAXITGTTKGGMDVWGQGATVTVSSA

SEQ ID NO: 36 - protein, 116 aa, Artificial Sequence
  Synthesized sequence with two or more selenocysteine residues substituted for two or more cysteine residues
  VARIANT (1)...(116): Xaa = selenocysteine or cysteine
QVQLVESGGGLVQPGGSLRLSXAASGFTFSSYWMSWVRQAPGKGLEWVSGISYSGSNTHYADSVKGRFTISRDNSKNTLYLQMNSLRAEDTAVYYXARMGIDLDYWGQGTLVTVSS

SEQ ID NO: 37 - protein, 117 aa, Artificial Sequence
  Synthesized sequence with two or more selenocysteine residues substituted for two or more cysteine residues
  VARIANT (1)...(117): Xaa = selenocysteine or cysteine
EVQLLESGGGLVQPGGSLRLSXAASGFTFSNAWMSWVRQAPGKGLEWVAFIWYDGSNKYYADSVKGRFTISRDNSKNTLYLQMNSLRAEDTAVYYXARYSGWYFDYWGQGTLVTVSS

SEQ ID NO: 38 - protein, 120 aa, Artificial Sequence
  Synthesized sequence with two or more selenocysteine residues substituted for two or more cysteine residues
  VARIANT (1)...(120): Xaa = selenocysteine or cysteine
QVQLQQWGAGLLKPSETLSLTXAVYGGSFSDYYWNWIRQPPGKGLEWIGEINHRGSTNSNPSLKSRVTLSLDTSKNQFSLKLRSVTAADTAVYYXAFGYSDYEYNWFDPWGQGTLVTVSS

SEQ ID NO: 39 - protein, 131 aa, Artificial Sequence
  Synthesized sequence with two or more selenocysteine residues substituted for two or more cysteine residues
  VARIANT (1)...(131): Xaa = selenocysteine or cysteine
EVHLVESGGGLVQPGGSLRLSXAASGFTFSRYWMSWVRQAQGKGLEWVASIKQAGSEKTYVDSVKGRFTISRDNAKNSLSLQMNSLRAEDTAVYYXAREGAYYYDSASYYPYYYYYSMDVWGQGTTVTVSS

SEQ ID NO: 40 - protein, 118 aa, Artificial Sequence
  Synthesized sequence with two or more selenocysteine residues substituted for two or more cysteine residues
  VARIANT (1)...(118): Xaa = selenocysteine or cysteine
EVQLVESGGGLVQPGGSLRLSXAASGFTFSSYSMNWVRQAPGKGLEWVSYISSSSSTIDYADSVKGRFTISRDNAKNSLYLQMNSLRDEDTAVYYXARESGWYLFDYWGQGTLVTVSS

SEQ ID NO: 41 - protein, 117 aa, Artificial Sequence
  Synthesized sequence with two or more selenocysteine residues substituted for two or more cysteine residues
  VARIANT (1)...(117): Xaa = selenocysteine or cysteine
EVQLVESGGGLVQPGGSLRLSXAASGFSFATYGVHWVRQSPGKGLEWLGVIWRGGSTDYSAAFMSRLTISKDNSKNTVYLQMNSLRAEDTAVYFXAKQAYGHYMDYWGQGTSVTVSS

SEQ ID NO: 42 - protein, 119 aa, Artificial Sequence
  Synthesized sequence with two or more selenocysteine residues substituted for two or more cysteine residues
  VARIANT (1)...(119): Xaa = selenocysteine or cysteine
QVELLESGGGLVQPGGSLRLSXAASGFTFDDYGMSWVRQAPGKGLEWVAVISYDGSNKYYADSVKGRFTISRDNSQNTLYLQMNSLRAEDTAVYYXASPLESPVAFDIWGQGTMVIVSS

SEQ ID NO: 43 - protein, 119 aa, Artificial Sequence
  Synthesized sequence with two or more selenocysteine residues substituted for two or more cysteine residues
  VARIANT (1)...(119): Xaa = selenocysteine or cysteine
QVQLQQPGAELVKPGASVKLSXKASGYTFTNYWMHWVKQRPGQGLEWIGEINPSHGRTIYNENFKSKATLTVDKSSITAFMQLSSLTSEDSAVYFXARGGLGPAWFAYWGQGTLVTVSA

SEQ ID NO: 44 - protein, 126 aa, Artificial Sequence
  Synthesized sequence with two or more selenocysteine residues substituted for two or more cysteine residues
  VARIANT (1)...(126): Xaa = selenocysteine or cysteine
QVTLRESGPALVKPTQTLTLTXTFSGFSLSTSGMXVSWIRQPPGKALEWLALIDWDDDKYYSTSLKTRLTISKDTSKNQVVLTMTNMDPVDTATYYXARILVDIVATITNDAFDVWGQGTMVTVSS

SEQ ID NO: 45 - protein, 129 aa, Artificial Sequence
  Synthesized sequence with two or more selenocysteine residues substituted for two or more cysteine residues
  VARIANT (1)...(129): Xaa = selenocysteine or cysteine
EVQLVESGGGLVQPGGSLRLSXAASGFTFSSYDMHWVRQATGKGLEWVSAIGTAGDTYYPDSVKGRFTISRENAKNSLYLQMNSLRAGDTAVYYXVREGTYYHDSGSDNYYSYGMDVWGQGTTVTVSSA

SEQ ID NO: 46 - protein, 123 aa, Artificial Sequence
  Synthesized sequence with two or more selenocysteine residues substituted for two or more cysteine residues
  VARIANT (1)...(123): Xaa = selenocysteine or cysteine
EVQLVESGGDLVKPGGSLKLSXAASGFTFSDYYMYWVRQTPEKRLEWVATINDGGTHTYYPDSLKGRFTISRDNAKNILYLQMSSLMSEDTAMYYXARDDYYYGSHFDAMDYWGQGTSVTVSS

SEQ ID NO: 47 - protein, 124 aa, Artificial Sequence
  Synthesized sequence with two or more selenocysteine residues substituted for two or more cysteine residues
  VARIANT (1)...(124): Xaa = selenocysteine or cysteine
QVTLKESGPGILQPSQTLSLTXSFSGFSLSTSGMGVSWIRQPSGKGLEWLAHIYWDDDKRYNPSLKSRLTISKDTSRNQVFLKITSVDTTDTATYYXTRSSGSIVIATGFAYWGQGTLVTVSAA

SEQ ID NO: 48 - protein, 119 aa, Artificial Sequence
  Synthesized sequence with two or more selenocysteine residues substituted for two or more cysteine residues
  VARIANT (1)...(119): Xaa = selenocysteine or cysteine
EVQLLESGGGLVQPGGSLRLSXAASGFTFSSYAMSWVRQAPGKGLEWVSAISGSGGSTYYADSVKGRFTISRDNSKNTLYLQMNSLRAEDTAVYYXARDLIHGVTRNWGQGTLVTVSSA

SEQ ID NO: 49 - protein, 119 aa, Artificial Sequence
  Synthesized sequence with two or more selenocysteine residues substituted for two or more cysteine residues
  VARIANT (1)...(119): Xaa = selenocysteine or cysteine
DVQLVESGGGLVKPGGSLKLSXAASGFDFSRYDMSWVRQTPEKRLEWVAYISSGGGSTYFPDTVKGRFTISRDNAKNTLYLQMNNLQSEDTAMFYXARQNKKLTWFDYWGQGTLVTVSS

SEQ ID NO: 50 - protein, 121 aa, Artificial Sequence
  Synthesized sequence with two or more selenocysteine residues substituted for two or more cysteine residues
  VARIANT (1)...(121): Xaa = selenocysteine or cysteine
QVQLVQSGAEVVKPGSSVKVSXKASGYTFTDYNVDWVKQAPGQGLQWIGNINPNNGGTIYNQKFKGKGTLTVDKSTSTAYMELSSLTSEDTAVYYXARSAFYNNYEYFDVWGQGTTVTVSS

SEQ ID NO: 51 - protein, 119 aa, Artificial Sequence
  Synthesized sequence with two or more selenocysteine residues substituted for two or more cysteine residues
  VARIANT (1)...(119): Xaa = selenocysteine or cysteine
QVTLKESGPVLVKPTETLTLTXTVSGFSLTNYHVQWIRQPPGKALEWLGVMWSDGDTSFNSVLKSRLTISRDTSKSQVVLTMTNMDPVDTATYYXARDGTIAAMDYFDYWGQGTLVTVS

SEQ ID NO: 52 - protein, 121 aa, Artificial Sequence
  Synthesized sequence with two or more selenocysteine residues substituted for two or more cysteine residues
  VARIANT (1)...(121): Xaa = selenocysteine or cysteine
EVQLVQSGGGLVQPKGSLKLSXAASGFNFNTYAMHWVRQAPGKGLEWIGRIRSKSHNYATDYADPVKDRFTISRDDSQGLLYLLMNNLKTEDTAMYYXMREGIYGSFAYWGQGTLVTVSAA

SEQ ID NO: 53 - protein, 129 aa, Artificial Sequence
  Synthesized sequence with two or more selenocysteine residues substituted for two or more cysteine residues
  VARIANT (1)...(129): Xaa = selenocysteine or cysteine
EVQLLESGGGLVQPGGSLRLSXAASGFTFSKYIMQWVRQAPGKGLEWVSGIRPSGGTTVYADSVKGRFTISRDNSKNTLYLQMNSLRAEDTAVYYXARALPRSGYLISPHYYYYALDVWGQGTTVTVSS

SEQ ID NO: 54 - protein, 117 aa, Artificial Sequence
  Synthesized sequence with two or more selenocysteine residues substituted for two or more cysteine residues
  VARIANT (1)...(117): Xaa = selenocysteine or cysteine
QVNLRESGGDLVKPGGSLRLSXAASGFTFRKYYMAWIRQAPGKGPEWLSTISNSGDIIDYADSVRGRFSISRDNAQKSLYLQMTSLRPDDSAIYYXAREYFFSFDVWGRGTMVTVSS

SEQ ID NO: 55 - protein, 120 aa, Artificial Sequence
  Synthesized sequence with two or more selenocysteine residues substituted for two or more cysteine residues
  VARIANT (1)...(120): Xaa = selenocysteine or cysteine
QVQLVESGGGVVQPGRSLRLSXTASGFRFRSHGMHWVRQAPGKGLEWVAVISYDGNNKLYADSVKGRITISRDNSKNTLFLQMNNVRAEDTAVYYXASPYTSDWQYFQYWGQGTLVIVSS

SEQ ID NO: 56 - protein, 118 aa, Artificial Sequence
  Synthesized sequence with two or more selenocysteine residues substituted for two or more cysteine residues
  VARIANT (1)...(118): Xaa = selenocysteine or cysteine
SEMKLEESGGGLVQPGGSMKLSXVASGFTFSNYWMNWVRQSPEKGLEWVAQIRLKSYNYATHYAESVKGRFTISRDDSKSSVYLQMNNLRAEDTGIYYXTPDGSDYWGQGTTLTVSSA

SEQ ID NO: 57 - protein, 120 aa, Artificial Sequence
  Synthesized sequence with two or more selenocysteine residues substituted for two or more cysteine residues
  VARIANT (1)...(120): Xaa = selenocysteine or cysteine
QVQLQQSGAELVRPGTSVKVSXKASGYAFTNNLIEWVKQRPGQGLEWIGVINPGSGDTNYNEKFKGKATLTADKSSNTAYMQLSSLTSDDSAVYFXARGDYYGGFAVDYWGQGTSVTVSS

SEQ ID NO: 58 - protein, 117 aa, Artificial Sequence
  Synthesized sequence with two or more selenocysteine residues substituted for two or more cysteine residues
  VARIANT (1)...(117): Xaa = selenocysteine or cysteine
DVQLQESGPGLVKPSQSLSLTXTVTGYSITSDYAWNWIRQFPGNKLEWMVYITYSGITGYNPSLKSRISITRDTSKNQFFLQLNSVTTGDTATYYXARYTTTAFDYWGQGTTLTVSS

SEQ ID NO: 59 - protein, 121 aa, Artificial Sequence
  Synthesized sequence with two or more selenocysteine residues substituted for two or more cysteine residues
  VARIANT (1)...(121): Xaa = selenocysteine or cysteine
ELKLEESGGGLVQPGGSMKLSXAASGFTFSDAWMDWVRQSPEKGLEWIAEIRSKANNYATYFAESVKGRFTISRDDSKSGVYLQMNNLRAEDTGIYFXTKLSLRYWFFDVWGAGTTVTVSS

SEQ ID NO: 60 - protein, 120 aa, Artificial Sequence
  Synthesized sequence with two or more selenocysteine residues substituted for two or more cysteine residues
  VARIANT (1)...(120): Xaa = selenocysteine or cysteine
EVQLVESGGGLVQPGGSLRLSXAASGFTFSSYAMSWVRQAPGKGLEWVSAISGSGGSTYYADSVKGRFTISRDNSKNTLYLQMNSLRAEDTAVYYXARYIDFGDHMDFWGQGTLVTVSSL

SEQ ID NO: 61 - protein, 121 aa, Artificial Sequence
  Synthesized sequence with two or more selenocysteine residues substituted for two or more cysteine residues
  VARIANT (1)...(121): Xaa = selenocysteine or cysteine
QVKLLEQSGAEVKKPGASVKVSXKASGFSIGNYGIHWVRQAPGQRLEWMGGIWSGGNADYAQKFQGRVTITRDTSATTAYMGLSSLRPEDTAVYYXARVGTYYDYEFDVWGQGTLVTVSSA

SEQ ID NO: 62 - protein, 120 aa, Artificial Sequence
  Synthesized sequence with two or more selenocysteine residues substituted for two or more cysteine residues
  VARIANT (1)...(120): Xaa = selenocysteine or cysteine
QVTLRESGPALVRPTQTLTLTXTFSGFSLNTSGMTVGWIRQPPGEALEWLAHIWWNDDKYYNPALKGRLAVSKDTSKNQVVLSMNTVGPGDTATYYXARMEDYDEAMDYWGQGILVTVSS

SEQ ID NO: 63 - protein, 119 aa, Artificial Sequence
  Synthesized sequence with two or more selenocysteine residues substituted for two or more cysteine residues
  VARIANT (1)...(119): Xaa = selenocysteine or cysteine
EVQLVESGGGLVQPGGSLRLSXAASGFTFSSYAVSWVRQAPGKGLEWVATISSGGSLTFYLDSVRGRFTISRDNSKNTLYLQMNSLRAEDTAVYYXARPIPDYYALDYWGQGTLVTVSS

SEQ ID NO: 64 - protein, 126 aa, Artificial Sequence
  Synthesized sequence with two or more selenocysteine residues substituted for two or more cysteine residues
  VARIANT (1)...(126): Xaa = selenocysteine or cysteine
QVQLVQSGAEVKKPGASVKVSXKASGYSFSSFGISWVRQAPGQGLEWLGWISAFNGYTKYAQKFQDRVTMTTDTSTSTAYMELRSLRSDDTAVYYXARDPAAWPLQQSLAWFDPWGQGTMVTVSSA

SEQ ID NO: 65 - protein, 122 aa, Artificial Sequence
  Synthesized sequence with two or more selenocysteine residues substituted for two or more cysteine residues
  VARIANT (1)...(122): Xaa = selenocysteine or cysteine
QVQLVQSGPEVKKPGASVKVSXTASGYTFTEYTMHWVRQAPGQGLEWMGGVNPYNDNTSYIRKLQGRVTLTVDRSSSTAYMELTSLTSDDTAVYYXARYGGLRPYYFPMDFWGQGTLVTVSS

SEQ ID NO: 66 - protein, 123 aa, Artificial Sequence
  Synthesized sequence with two or more selenocysteine residues substituted for two or more cysteine residues
  VARIANT (1)...(123): Xaa = selenocysteine or cysteine
EVQLLESGGGLVQPGGSLRLSXAASGFTFSNYIMWWVRQAPGKGLEWVSVISSSGGMTRYADSVKGRFTISRDNSKNTLYLQMNSLRAEDTAVYYXARDNGDYVGEKGFDIWGQGTMVTVSSA

SEQ ID NO: 67 - protein, 126 aa, Artificial Sequence
  Synthesized sequence with two or more selenocysteine residues substituted for two or more cysteine residues
  VARIANT (1)...(126): Xaa = selenocysteine or cysteine
QVQLVQSGAEVKKPGASVKVSXKASGYTFTSYGISWVRQAPGQGLEWMGWISAYNGNTNYAQKLQGRVTMTTDTSTSTAYMELRSLRSDDTAVYYXARDTPGIAARRYYYYGMDVWGQGTTVTVSS

SEQ ID NO: 68 - protein, 116 aa, Artificial Sequence
  Synthesized sequence with two or more selenocysteine residues substituted for two or more cysteine residues
  VARIANT (1)...(116): Xaa = selenocysteine or cysteine
EVQLLVSGGGLVQPGGSLRLSXAASGFTFKAYPMMWVRQAPGKGLEWVSEISPSGSYTYYADSVKGRFTISRDNSKNTLYLQMNSLRAEDTAVYYXAKDPRKLDYWGQGTLVTVSS

SEQ ID NO: 69 - protein, 120 aa, Artificial Sequence
  Synthesized sequence with two or more selenocysteine residues substituted for two or more cysteine residues
  VARIANT (1)...(120): Xaa = selenocysteine or cysteine
NVQLVESGGGLVQPGRSLRLSXTTSGFTFGDYAMIWARQAPGKGLEWVSSISSSSSYIYYADSVKGRFTISRDNAKNSLYLQMNSLRAEDTAVYYXARERYDFWSGMDVWGKGTTVTVSS

SEQ ID NO: 70 - protein, 117 aa, Artificial Sequence
  Synthesized sequence with two or more selenocysteine residues substituted for two or more cysteine residues
  VARIANT (1)...(117): Xaa = selenocysteine or cysteine
EVHLQQSGPELEKPGASVKISXKASGYSFTGYNMNVKQSNGKSLEWIGNIDPYYGDTDYDQKFKGTLTADKSSNTVYMQLQSLTSEDSAVYYXARGAHRDYYAMDYWGQGTSVTVSS

SEQ ID NO: 71 - protein, 124 aa, Artificial Sequence
  Synthesized sequence with two or more selenocysteine residues substituted for two or more cysteine residues
  VARIANT (1)...(124): Xaa = selenocysteine or cysteine
EFEVQLQESGPELVKPGASVKMSXKASGYTFTSYVMHWVKQKPGQGLEWIGYFNPYNDGTDYYEKFKGKATLTSDKSSSTAYMALSSLTSEDSAVYYXARGTYYYGSSYPFDYWGQGTTLTVSS

SEQ ID NO: 72 - protein, 117 aa, Artificial Sequence
  Synthesized sequence with two or more selenocysteine residues substituted for two or more cysteine residues
  VARIANT (1)...(117): Xaa = selenocysteine or cysteine
QVQLVQSGAEVKKPGASVKVSXTASGYTFTHYGMNWVRQAPGKGLEWMGWINTYTGEPTYADKFKDRFTFSLETSASTVYMELTSLTSDDTAVYYXARERGDAMDYWGQGTLVTVSS

SEQ ID NO: 73 - protein, 113 aa, Artificial Sequence
  Synthesized sequence with two or more selenocysteine residues substituted for two or more cysteine residues
  VARIANT (1)...(113): Xaa = selenocysteine or cysteine
QVQLQQSGAELAKPGASVKMSXKASGYTFTNYWMHWVKQRPGQGLEWIGYINPSNDYTKYNQKFKDKATLTADKSSNTAYMQLGSLTSEDSAVYYXARQGFPYWGQGTLVTVS

SEQ ID NO: 74 - protein, 120 aa, Artificial Sequence
  Synthesized sequence with two or more selenocysteine residues substituted for two or more cysteine residues
  VARIANT (1)...(120): Xaa = selenocysteine or cysteine
QSVKESEGGLFKPTDTLTLTXTVSGFSLSRYGINWVRQAPGSGLQWIGAIGETGRAYFASWAKSRSTITRNTNLNTVTLRMTSLTAADTATYFXARGELFNNGWGAFNIWGPGTLVTVSS

SEQ ID NO: 75 - protein, 121 aa, Artificial Sequence
  Synthesized sequence with two or more selenocysteine residues substituted for two or more cysteine residues
  VARIANT (1)...(121): Xaa = selenocysteine or cysteine
QVTLKESGPGILQPSQTLSLTXSFSGFSLSTSNMGVGWIRQPSGKGLEWLLHILWNDNKHYNPALKSRLTISDTYKNQVFLIANVDTADTATYYXARILYRSNYYVMDYWGQGTSVTVSSA

SEQ ID NO: 76 - protein, 114 aa, Artificial Sequence
  Synthesized sequence with two or more selenocysteine residues substituted for two or more cysteine residues
  VARIANT (1)...(114): Xaa = selenocysteine or cysteine
EVQLQQSGPDLVKPGASVKISXKASGYSFTGYYMHWVKQSHGKSLEWIGRVNPNNGGTSYNQKFKGKAILTVDKSSSTAYMELRSLTSEDSAVYYXATYAMDYWGQGTSVTVSS

SEQ ID NO: 77 - protein, 122 aa, Artificial Sequence
  Synthesized sequence with two or more selenocysteine residues substituted for two or more cysteine residues
  VARIANT (1)...(122): Xaa = selenocysteine or cysteine
QVSLKESGPGILQPSQTLSLTXSFSGFSLSTSGMGVSWIRQPSGKGLEWLAHIYWDDDKRYNPSLKSRLTISKDTSSNLVFLKITSVDTADTATYYXARREVRRDYYAMDYWGQGTSVTVSS

SEQ ID NO: 78 - protein, 118 aa, Artificial Sequence
  Synthesized sequence with two or more selenocysteine residues substituted for two or more cysteine residues
  VARIANT (1)...(118): Xaa = selenocysteine or cysteine
QVQLQQSGAELAKPGASVKMSXKASGYTFTTYWMHWVKQRPGQGLEWIGYINPNTDYTEYNQKFKDKATLTADKSSSTAFMQLSSLTSEDSAVYYXASSRDAYHGTYWGQGTLVTVSA

SEQ ID NO: 79 - protein, 121 aa, Artificial Sequence
  Synthesized sequence with two or more selenocysteine residues substituted for two or more cysteine residues
  VARIANT (1)...(121): Xaa = selenocysteine or cysteine
QVQLQQPGAELVRPGASVKLSXKASGYTFTTYWMNWVKQRPEQGLEWIGRIDPYDSETHYNQKFKDKAILTVDKSSSTAYMQLSSLTSEDSAVYYXARGPYYGTNPWFPYWGQGTLVTVSS

SEQ ID NO: 80 - protein, 117 aa, Artificial Sequence
  Synthesized sequence with two or more selenocysteine residues substituted for two or more cysteine residues
  VARIANT (1)...(117): Xaa = selenocysteine or cysteine
QVQLVESGGGLVQPGGSLRLSXAASGFTFSSYEMNWVRQAPGKGLEWVSYISSSGSTIYYADSVKGRFTISRDNSKNTLYLQMNSLRAEDTAVYYXASGDYMDVWGQGTTVTVSSSA

SEQ ID NO: 81 - protein, 105 aa, Artificial Sequence
  Synthesized sequence with two or more selenocysteine residues substituted for two or more cysteine residues
  VARIANT (1)...(105): Xaa = selenocysteine or cysteine
PGASVKLSXKASGYTFTTYWINWIKQRPGQGLEWIGRIAPGSGSTYYNEMFKSKATLTVDTSSSTAYIQLSSLSSEDSAVYFXARDGMGYYYGSRYWYFDVWGAG

SEQ ID NO: 82 - protein, 121 aa, Artificial Sequence
  Synthesized sequence with two or more selenocysteine residues substituted for two or more cysteine residues
  VARIANT (1)...(121): Xaa = selenocysteine or cysteine
QVQLVQSGAEVKKPGASVKVSXKASGYAFSNSWMNWVRQAPGQGLEWMGRIYPGDGDTKYNGKFKGRVTMTADTSTSTVYMELSSLRSEDTAVYYXARFLLISTVTAVDYWGQGTLVTVSS

SEQ ID NO: 83 - protein, 117 aa, Artificial Sequence
  Synthesized sequence with two or more selenocysteine residues substituted for two or more cysteine residues
  VARIANT (1)...(117): Xaa = selenocysteine or cysteine
QVQLVESGGGLVQPGGSLRLSXAASGFTFSSYWMNWVRQAPGKGLEWVSGIENKYAGGATYYAASVKGRFTISRDNSKNTLYLQMNSLRAEDTAVYYXARGFGTDFWGQGTLVTVSS

SEQ ID NO: 84 - protein, 115 aa, Artificial Sequence
  Synthesized sequence with two or more selenocysteine residues substituted for two or more cysteine residues
  VARIANT (1)...(115): Xaa = selenocysteine or cysteine
EVKLVESGGGLVQPGGSLKLSXAVSGFTFSDNGMAWVRQAPRKGPEWIAFISNLAYSIDYADTVTGRFTISRDNAKNTLYLEMSSLRSEDTAMYYXVSGTWFAYWGQGTLVTVSA

SEQ ID NO: 85 - protein, 120 aa, Artificial Sequence
  Synthesized sequence with two or more selenocysteine residues substituted for two or more cysteine residues
  VARIANT (1)...(120): Xaa = selenocysteine or cysteine
EVQLVESGGGLVQPGGSLRLSXAASGFTFLGYGIHWVRQAPGKGLEWVGWISPAGGSTDYADSVKGRFTISADTSKNTAYLQMNSLRAEDTAVYYXARGPFSPWVMDYWGQGTLVTVSSA

SEQ ID NO: 86 - protein, 121 aa, Artificial Sequence
  Synthesized sequence with two or more selenocysteine residues substituted for two or more cysteine residues
  VARIANT (1)...(121): Xaa = selenocysteine or cysteine
EVQLVESGGGLVQPGGSLRLSXAASGFSLTVYSVHWVRQAPGKGLEWVGALWGSGGTEYNSNLKSRFTISRDTSKNTVYLQMNSLRAEDTAVYYXARDQGLNYGSLFDYWGQGTLVTVSSA

SEQ ID NO: 87 - protein, 121 aa, Artificial Sequence
  Synthesized sequence with two or more selenocysteine residues substituted for two or more cysteine residues
  VARIANT (1)...(121): Xaa = selenocysteine or cysteine
EVQLVESGGGLVQPGGSLRLSXAASGFSLSGSWIHWVRQAPGKGLEWVGWINPYRGYAYYADSVKGRFTISADTSKNTAYLQMNSLRAEDTAVYYXAREYSGWGGSSVGYAMDYWGQGTLV

SEQ ID NO: 88 - protein, 120 aa, Artificial Sequence
  Synthesized sequence with two or more selenocysteine residues substituted for two or more cysteine residues
  VARIANT (1)...(120): Xaa = selenocysteine or cysteine
QVQLKESGPGLVKPSQSLSLTXSVTGFSITTGGYWWTWIRQFPGQKLEWMGYIFSSGNTNYNPSIKSRISITRDTSKNQFFLQLNSVTTEGDTARYYXARAYGKLGFDYWGQGTLVTVSS

SEQ ID NO: 89 - protein, 119 aa, Artificial Sequence
  Synthesized sequence with two or more selenocysteine residues substituted for two or more cysteine residues
  VARIANT (1)...(119): Xaa = selenocysteine or cysteine
DVQLQESGPGLVKPSQSLSLTXTVTGYSITSDYAWNWIRQFPGNKLEWMGYISYSGFTNYNPSLKSRISITRDTSKNQFFLQLSSVTTEDTATYFXEGGNYRYSWFPYWGQGTLVTVSA

SEQ ID NO: 90 - protein, 117 aa, Artificial Sequence
  Synthesized sequence with two or more selenocysteine residues substituted for two or more cysteine residues
  VARIANT (1)...(117): Xaa = selenocysteine or cysteine
EVQLVESGGGLVQPGGSLRLSXAASGYSFSSHYMHWVRQAPGKGLEWVGYIDPSNGETTYNQKFKGRFTISRDNSKNTLYLQMNSLRAEDTAVYYXAARGDYRYNGDWFFDVWGQGT

SEQ ID NO: 91 - protein, 122 aa, Artificial Sequence
  Synthesized sequence with two or more selenocysteine residues substituted for two or more cysteine residues
  VARIANT (1)...(122): Xaa = selenocysteine or cysteine
EVQLVESGGGLVQPGGSLKLSXAASGFTFSHYYMSWVRQTPEKRLEWVAYINSGGGRTDYPDSVKGRFTISRDNAKNTLHLQMSSLKSEDTAMYYXARLDYYGGSPYFDYWGQGTTLTVSSA

SEQ ID NO: 92 - protein, 120 aa, Artificial Sequence
  Synthesized sequence with two or more selenocysteine residues substituted for two or more cysteine residues
  VARIANT (1)...(120): Xaa = selenocysteine or cysteine
QVQLVQSGAEVKKPGSSVKVSXKASGYTFSSNVISWVRQAPGQGLEWMGGVIPIVDIANYAQRFKGRVTITADESTSTTYMELSSLRSEDTAVYYXASTLGLVLDAMDYWGQGTLVTVSS

SEQ ID NO: 93 - protein, 118 aa, Artificial Sequence
  Synthesized sequence with two or more selenocysteine residues substituted for two or more cysteine residues
  VARIANT (1)...(118): Xaa = selenocysteine or cysteine
EVKLVESGGGSVKPGGSLKVSXAASGFIFSNYGMSWVRQTPEKSLEWVASISRGGSTFYSDRVKGRFTISRENGRNILYLQMNSLRSEDTAIYYXVRYDYDEGATDYWGQGTTLTVSS

SEQ ID NO: 94 - protein, 122 aa, Artificial Sequence
  Synthesized sequence with two or more selenocysteine residues substituted for two or more cysteine residues
  VARIANT (1)...(122): Xaa = selenocysteine or cysteine
EVTLKESGPVLVKPTETLTLTXTVSGFSLSTYGMGVGWIRQPPGKALEWLAHIWWDDVKRYNPALKSRLTISKDTSKSQVVLTMTNMDPVDTATYYXARMGSDYDVWFDYWGQGTLVTVSSA

SEQ ID NO: 95 - protein, 121 aa, Artificial Sequence
  Synthesized sequence with two or more selenocysteine residues substituted for two or more cysteine residues
  VARIANT (1)...(121): Xaa = selenocysteine or cysteine
EVQLLESGGGLVQPGGSLRLSXAASGFTFSSYDMSWVRQAPGKGLEWVSGISYSGGSTYYADSVKGRFTISRDNSKNTLYLQMNSLRAEDTAVYYXAKGPFRMRFRSFDYWGQGTLVTVSS

SEQ ID NO: 96 - protein, 116 aa, Artificial Sequence
  Synthesized sequence with two or more selenocysteine residues substituted for two or more cysteine residues
  VARIANT (1)...(116): Xaa = selenocysteine or cysteine
VQLQQSGTVLARPGASVKMSXKASGYTFTSYWMHWVKQRPGQGLEWIGAIYPGNSDTSYNQKFKGKAKLTAVTSTSTAYMELSSLTNEDSAVYYXTRVYGRAMDYWGQGTSVTVSS

SEQ ID NO: 97 - protein, 120 aa, Artificial Sequence
  Synthesized sequence with two or more selenocysteine residues substituted for two or more cysteine residues
  VARIANT (1)...(120): Xaa = selenocysteine or cysteine
QVQLKESGPGLVAPSQSLSITXTVSGFSVTNYGVHWVRQPPGKGLEWLGVIWAGGITNYNSAFMSRLSISKDNSKSQVFLKMNSLQIDDTAMYYXASRGGHYGYALDYWGQGTSVTVSSA

SEQ ID NO: 98 - protein, 117 aa, Artificial Sequence
  Synthesized sequence with two or more selenocysteine residues substituted for two or more cysteine residues
  VARIANT (1)...(117): Xaa = selenocysteine or cysteine
QVQLVQSGAEVKKPGASVKVSXKASGYTFTNYNMHWVRQAPGQRLEWMGTIYPGNDDTSYNQKFKDRVTITADTSASTAYMELSSLRSEDTAVYYXARGGYRAMDYWGQGTLVTVSS

SEQ ID NO: 99 - protein, 117 aa, Artificial Sequence
  Synthesized sequence with two or more selenocysteine residues substituted for two or more cysteine residues
  VARIANT (1)...(117): Xaa = selenocysteine or cysteine
QVQLVESGGGVVQPGRSLRLSXTASGFTFSHYGMYWVRQAPGKGLEWVAVIWYDGSYEYNEDSVKGRFTISRDNSKNTLYLQMNSLRAEDTAVYYXARDRVGLFDYWGQGTLVTVSS

SEQ ID NO: 100 - protein, 120 aa, Artificial Sequence
  Synthesized sequence with two or more selenocysteine residues substituted for two or more cysteine residues
  VARIANT (1)...(120): Xaa = selenocysteine or cysteine
QVQLVQSGAEVKKPGSSVKVSXKASGGTFSSYAISWVRQAPGQGLEWMGRIIPILGIANYAQKFQGRVTITADKSTSTAYMELSSLRSEDTAVYYXARDMGSRNYYYFYWGQGTLVTVSS

SEQ ID NO: 101 - protein, 118 aa, Artificial Sequence
  Synthesized sequence with two or more selenocysteine residues substituted for two or more cysteine residues
  VARIANT (1)...(118): Xaa = selenocysteine or cysteine
QVQLQQPGAEVVKPGASVKMSXKASGYTFTSYYIHWIKQTPGQGLEWVGVIYPGNDDISYNQKFQGKATLTADKSSTTAYMQLSSLTSEDSAVYYXAREVRLRYFDVWGQGTTVTVSS

SEQ ID NO: 102 - protein, 121 aa, Artificial Sequence
  Synthesized sequence with two or more selenocysteine residues substituted for two or more cysteine residues
  VARIANT (1)...(121): Xaa = selenocysteine or cysteine
QVQLQQSGSELKKPGASVKVSXKASGFTFTNYGMNWVKQAPGQGLKWMGWINTYTREPTYADDFKGRFAFSLDTSVSTAYLQISSLKADDTAVYFXARDITAVVPTGFDYWGQGSLVTVSS

SEQ ID NO: 103 - protein, 120 aa, Artificial Sequence
  Synthesized sequence with two or more selenocysteine residues substituted for two or more cysteine residues
  VARIANT (1)...(120): Xaa = selenocysteine or cysteine
VQLQQSGAELKKPGASVKVSXKASGYTFTEYIIHWIKLRSGQGLEWIGWFYPGSNDIQYNAQFKGKATLTADKSSSTVYMELTGLTPEDSAVYFXARRDDFSGYDALPYWGQGTLVTVSA

SEQ ID NO: 104 - protein, 121 aa, Artificial Sequence
  Synthesized sequence with two or more selenocysteine residues substituted for two or more cysteine residues
  VARIANT (1)...(121): Xaa = selenocysteine or cysteine
EVKVVESGGGLVQPGGSLRLSXATSGFTFTDYYMSWVRQPPGKALEWLGFIRNRVSGYTTEYSASVQGRFTISRDNSQSILYLQMNTLRAEDSATYYXARDHYGNFAMDYWGQGTSVTVSS

SEQ ID NO: 105 - protein, 117 aa, Artificial Sequence
  Synthesized sequence with two or more selenocysteine residues substituted for two or more cysteine residues
  VARIANT (1)...(117): Xaa = selenocysteine or cysteine
EVQLVESGGGLVQPGGSLRLSXAVSGFSLTSHGVHWVRQAPGKGLEWLGVIWGAGRTDYNAAFISRLSISRDISKSQVYLQMNSLRAEDTAVYYXARNRYESYFDYWGQGTLVTVSS

SEQ ID NO: 106 - protein, 118 aa, Artificial Sequence
  Synthesized sequence with two or more selenocysteine residues substituted for two or more cysteine residues
  VARIANT (1)...(118): Xaa = selenocysteine or cysteine
KVQLQQSGTELVKPGASVKVSXKASGYIFTEYIIHWVKQRSGQGLEWIGWLYPESNIIKYNEKFKDKATLTADKSSSTVYMELSRLTSEDSAVYFXTRHDGTNFDYWGQGTTLTVSSA

SEQ ID NO: 107 - protein, 124 aa, Artificial Sequence
  Synthesized sequence with two or more selenocysteine residues substituted for two or more cysteine residues
  VARIANT (1)...(124): Xaa = selenocysteine or cysteine
QVQLQQSGAEVKKPGSSVKVSXKASGYAFSSYWMNWVRQRPGQGLEWIGQIWPGDGDTNYNGKFKGRATITADESTNTAYMELSSLRSEDTAFYSXARRETTTVGRYYYAMDYWGQGTTVTVSS

SEQ ID NO: 108 - protein, 121 aa, Artificial Sequence
  Synthesized sequence with two or more selenocysteine residues substituted for two or more cysteine residues
  VARIANT (1)...(121): Xaa = selenocysteine or cysteine
QVQLQESGGGVVQPGRSLRLSXSASGFTFSDYYMYWVRQAPGKGLEWVAYITNYGGSTYYPDTVKGRFTISRDNAKNTLFLQMDSLRPEDTGVYFXARQSNYDYDGWFAYWGQGTPVTVSS

SEQ ID NO: 109 - protein, 117 aa, Artificial Sequence
  Synthesized sequence with two or more selenocysteine residues substituted for two or more cysteine residues
  VARIANT (1)...(117): Xaa = selenocysteine or cysteine
QVQLQESGAELVRPGASVKLSXKASGYTFSISWINWVKQRPGQGLEWIGNIYPSGGYTNYNQKFKDKATLTVDKSSNTAYIQLSSPTSEDSAVYYXTRGYGHLDYWGQGTTLTVSAA

SEQ ID NO: 110 - protein, 123 aa, Artificial Sequence
  Synthesized sequence with two or more selenocysteine residues substituted for two or more cysteine residues
  VARIANT (1)...(123): Xaa = selenocysteine or cysteine
EVKLVNSGGGLVQPGNSLRLSXATSGFTFTDFYMSWVRQPPGKALEWLGFVRNRANGYTTEYSVSVKGRFIISRDNFQSTLFLQMNTLRAEDSGTYYXVRGPGDTADYTMDYWGQGTSVTVSS

SEQ ID NO: 111 - protein, 118 aa, Artificial Sequence
  Synthesized sequence with two or more selenocysteine residues substituted for two or more cysteine residues
  VARIANT (1)...(118): Xaa = selenocysteine or cysteine
QIQLVQSGPDLKKPGETVKISXKASGYTFTNYGINWVKQAPGKGFKWMGWIDTYTGEPTYVDDFKGRFVFSLETSASTAYLQINNLKNEDTATYFXVRKRAYDYEIYWGQGTPLTVSS

SEQ ID NO: 112 - protein, 108 aa, Artificial Sequence
  Synthesized sequence with two or more selenocysteine residues substituted for two or more cysteine residues
  VARIANT (1)...(108): Xaa = selenocysteine or cysteine
EVQLVQSGAEVKKPGESLKISXKGSGYSFTSYWISWVRQMPGKGLEWMGIIYPGDSYTRYSPSFQGQVTISADKSISTAYLQWSSLKASDTAMYYXARVPVSPAYLDY

SEQ ID NO: 113 - protein, 122 aa, Artificial Sequence
  Synthesized sequence with two or more selenocysteine residues substituted for two or more cysteine residues
  VARIANT (1)...(122): Xaa = selenocysteine or cysteine
QVQLVQSGAEVKKPGASVKVSXKASGYTFTTYGITWVRQAPGQGLEWMGEIFPGSGNTYYNEKFKGRVTITADKSTSTAYMELSSLRSEDTAVYYXARESFSDGYYGYFDYWGQGTLVTVSS

SEQ ID NO: 114 - protein, 127 aa, Artificial Sequence
  Synthesized sequence with two or more selenocysteine residues substituted for two or more cysteine residues
  VARIANT (1)...(127): Xaa = selenocysteine or cysteine
QVQLVESGGGVVQPGRSLRLSXAASGFTFSSYAMHWVRQAPGKGLEWVAVISYDGSNKYYADSVKGRFTISRDNSKNTLYLQMNSLRAEDTAVYYXARGIAAAGPPYYYYYYYMDVWGKGTTVTVSS

SEQ ID NO: 115 - protein, 121 aa, Artificial Sequence
  Synthesized sequence with two or more selenocysteine residues substituted for two or more cysteine residues
  VARIANT (1)...(121): Xaa = selenocysteine or cysteine
QVQLQEWGAGLLKPSETLSLTXAVSGGSLSGHYWSWVRLPPGKGLEWIGEISHSGNTNYNSSLKSRASISIDTSKNEYSLNLKSVTAVDTAVYYXARFYGDYPSSYGMDVWGQGTTVTVSS

SEQ ID NO: 116 - protein, 115 aa, Artificial Sequence
  Synthesized sequence with two or more selenocysteine residues substituted for two or more cysteine residues
  VARIANT (1)...(115): Xaa = selenocysteine or cysteine
EAQLQQSGAELVKPGASVKLSXTASGFNIQETYMHWVKQRPEQGLEWIGRIDPANGNTKDDPKFQGKASITVDTSSNTAYLQLSSLTSEDTAVYYXASSYAMDYWGQGTSVTVSS

SEQ ID NO: 117 - protein, 119 aa, Artificial Sequence
  Synthesized sequence with two or more selenocysteine residues substituted for two or more cysteine residues
  VARIANT (1)...(119): Xaa = selenocysteine or cysteine
QVQLVQSGAEVKKPGASVKVSXKVSGKTFWSYGINWVRQAPGKGLEWMGYIYIGTGYTEPNPKYKGRVTMTEDTSTDTAYMELSSLRSEDTAVYYXATIGGYYGNFDQWGQGTTVTVSS

SEQ ID NO: 118 - protein, 120 aa, Artificial Sequence
  Synthesized sequence with two or more selenocysteine residues substituted for two or more cysteine residues
  VARIANT (1)...(120): Xaa = selenocysteine or cysteine
QDQLVESGGGVVQPGRSLRLSXAASGFTFSSYGMHWVRQAPGEGLEWVAVIWYDGSNKYYADSVKGRFTISRDNSKNTLYLQMNSLRAEDTAVYYXARGDYEVDYGMDVWGQGTTVTVAS

SEQ ID NO: 119 - protein, 116 aa, Artificial Sequence
  Synthesized sequence with two or more selenocysteine residues substituted for two or more cysteine residues
  VARIANT (1)...(116): Xaa = selenocysteine or cysteine
EVQLVQSGAEVKKPGASVKVSXKVSGYTFTDYYMHWVQQAPGKGLEWMGLVDPEDGETIYAEKFQGRVTITADTSTDTAYMELSSLRSEDTAVYYXARDDYMDVWGKGTLVTVSSA

SEQ ID NO: 120 - protein, 114 aa, Artificial Sequence
  Synthesized sequence with two or more selenocysteine residues substituted for two or more cysteine residues
  VARIANT (1)...(114): Xaa = selenocysteine or cysteine
QVQLVQSGSELKKPGASVKVSXKASGYTFTDYSMRWVRQAPGQGLEWMGWINTETGSPTYADDFKGRFVFSLDTSVSTAYLQISSLKAEDTAVYYXARGFAYWGQGTLVTVSSA

SEQ ID NO: 121 - protein, 122 aa, Artificial Sequence
  Synthesized sequence with two or more selenocysteine residues substituted for two or more cysteine residues
  VARIANT (1)...(122): Xaa = selenocysteine or cysteine
EVTLKESGPVLVKPTETLTLTXTVSGFSLSTYGVGVGWIRQPPGKALEWLAHIWWDDVKRYNPALKSRLTISKDTSKSQVVLTMTNMDPVDTATYYXARLGSDYDVWFDYWGQGTLVTVSSA

SEQ ID NO: 122 - protein, 119 aa, Artificial Sequence
  Synthesized sequence with two or more selenocysteine residues substituted for two or more cysteine residues
  VARIANT (1)...(119): Xaa = selenocysteine or cysteine
EVQLLESGGGLVQPGGSLRLSXAASGFTFSDYYMYWVRQAPEKRLEWVAYISNGGGSSHYVDSVKGRFTISRDNAKNTLYLQMNSLRAEDTALYHXARGMDYGAWFAYWGQGTLVTVSS

SEQ ID NO: 123 - protein, 118 aa, Artificial Sequence
  Synthesized sequence with two or more selenocysteine residues substituted for two or more cysteine residues
  VARIANT (1)...(118): Xaa = selenocysteine or cysteine
QVQLQESGPGLVKPSQTLSLTXTVSDYSITSDYAWNWIRQFPGKGLEWMGYISYSGSTSYNPSLKSRITISRDTSKNQFSLQLNSVTAADTAVYYXASFDYAHAMDYWGQGTTVTVSS

SEQ ID NO: 124 - protein, 123 aa, Artificial Sequence
  Synthesized sequence with two or more selenocysteine residues substituted for two or more cysteine residues
  VARIANT (1)...(123): Xaa = selenocysteine or cysteine
QVQLVESGGGVVQPGRSLRLSXAASGFTFTNYGMHWVRQAPGKGLEWVAVISHDGNNKYYVDSVKGRFTISRDNSKNTLYLQMNSLRAEDTAVYYXAREGIDFWSGLNWFDPWGQGTLVTVSS

SEQ ID NO: 125 - protein, 129 aa, Artificial Sequence
  Synthesized sequence with two or more selenocysteine residues substituted for two or more cysteine residues
  VARIANT (1)...(129): Xaa = selenocysteine or cysteine
EVQLLESGGGLVQPGGSLRLSXAASGFTFSHYMMAWVRQAPGKGLEWVSRIGPSGGPTHYADSVKGRFTISRDNSKNTLYLQMNSLRAEDTAVYYXAGYDSGYDYVAVAGPAEYFQHWGQGTLVTVSSA

SEQ ID NO: 126 - protein, 125 aa, Artificial Sequence
  Synthesized sequence with two or more selenocysteine residues substituted for two or more cysteine residues
  VARIANT (1)...(125): Xaa = selenocysteine or cysteine
QVQLVQSGAEVKKPGASVKVSXKASGYTFTGYYMHWVRQAPGQGLEWMGWINPHSGGTNYAQKFQGRVTMTRDTSISTAYMELSRLRSDDTAVYYXARTYYYDSSGYYHDAFDIWGQGTMVTVSS

SEQ ID NO: 127 - protein, 116 aa, Artificial Sequence
  Synthesized sequence with two or more selenocysteine residues substituted for two or more cysteine residues
  VARIANT (1)...(116): Xaa = selenocysteine or cysteine
QVQLVQSGAEVKKPGASVKVSXKASGYAFTSYYMHWVRQAPGQGLEWMGIINPRGGSTSYAQKFQGRVTMTRDTSTSTVYMELSSLRSEDTAVYYXARGKYWMYDWGKGTLVTVSS

SEQ ID NO: 128 - protein, 113 aa, Artificial Sequence
  Synthesized sequence with two or more selenocysteine residues substituted for two or more cysteine residues
  VARIANT (1)...(113): Xaa = selenocysteine or cysteine
EVQLVESGGGLVQPGGSLRLSXAASGYTFSDYYLYWVRQAPGKGLEWVGGISPSSGGTTFADAFEGRFTISVDKSKNTAYLQMNSLRAEDTAVYYXTRDAYGDWYFDVWGQGT

SEQ ID NO: 129 - protein, 115 aa, Artificial Sequence
  Synthesized sequence with two or more selenocysteine residues substituted for two or more cysteine residues
  VARIANT (1)...(115): Xaa = selenocysteine or cysteine
EVQLVQSGPEVKKPGATVKISXKTSGYTFTEYTIHWVKQAPGKGLEWIGNINPNNGGTTYNQKFEDKATLTVDKSTDTAYMELSSLRSEDTAVYYXAAGWNFDYWGQGTLLTVSS

SEQ ID NO: 130 - protein, 119 aa, Artificial Sequence
  Synthesized sequence with two or more selenocysteine residues substituted for two or more cysteine residues
  VARIANT (1)...(119): Xaa = selenocysteine or cysteine
EVQLLESGGGLVQPGGSLRLSXAASGFTFSHYVMAWVRQAPGKGLEWVSSISSSGGWTLYADSVKGRFTISRDNSKNTLYLQMNSLRAEDTAVYYXTRGLKMATIFDYWGQGTLVTVSS

SEQ ID NO: 131 - protein, 120 aa, Artificial Sequence
  Synthesized sequence with two or more selenocysteine residues substituted for two or more cysteine residues
  VARIANT (1)...(120): Xaa = selenocysteine or cysteine
EVQLVESGGGLVQPGGSLRLSXAASGFTFSSYAMSWVRQAPGKGLEWVSYISDDGSLKYYADSVKGRFTISRDNSKNTLYLQMNSLRAEDTAVYYXARHPYWYGGQLDLWGQGTLVTVSS

SEQ ID NO: 132 - protein, 120 aa, Artificial Sequence
  Synthesized sequence with two or more selenocysteine residues substituted for two or more cysteine residues
  VARIANT (1)...(120): Xaa = selenocysteine or cysteine
QVQLVESGGGLVQPGGSLRLSXAASGFTFSSYYMNWVRQAPGKGLEWVSGISGDPSNTYYADSVKGRFTISRDNSKNTLYLQMNSLRAEDTAVYYXARDLPLVYTGFAYWGQGTLVTVSS

SEQ ID NO: 133 - protein, 122 aa, Artificial Sequence
  Synthesized sequence with two or more selenocysteine residues substituted for two or more cysteine residues
  VARIANT (1)...(122): Xaa = selenocysteine or cysteine
EVQLVESGGGSVQPGESLRLSXVASGFTFSRYKMNWVRQAPGKGLEWVSYISRSGRDIYYADSVKGRFTISRDNAKNSLYLQMNSLRDEDTAVYYXAGTVTTYYYDFGMDVWGQGTTVTVSS

SEQ ID NO: 134 - protein, 119 aa, Artificial Sequence
  Synthesized sequence with two or more selenocysteine residues substituted for two or more cysteine residues
  VARIANT (1)...(119): Xaa = selenocysteine or cysteine
EVQLVESGGGLVQPGGSLRLSXAFSGFTLSTSGMGIGWVRQAPGKGLEWVAHWWDDDKYYNPSLKSRFTISRDTSKNTVYLQMNSLRAEDTAVYYXARNYYPYDAWFDYWGQGTLVTVS

SEQ ID NO: 135 - protein, 129 aa, Artificial Sequence
  Synthesized sequence with two or more selenocysteine residues substituted for two or more cysteine residues
  VARIANT (1)...(129): Xaa = selenocysteine or cysteine
QVQLVESGGGVVQPGKSLRLSXAASGFTFSSYGMYWVRQAPGKGLEWVAVISYDGSNKYYADSVKGRFTISRDNSKNTLYLQMNSLRAEDTAVYNXAKEMRYGSGRKAIKYYYGMDVWGQGTTVTVSSA

SEQ ID NO: 136 - protein, 115 aa, Artificial Sequence
  Synthesized sequence with two or more selenocysteine residues substituted for two or more cysteine residues
  VARIANT (1)...(115): Xaa = selenocysteine or cysteine
QLQLQESGPGLVKPSETLSLTXAVSGASISNWWSWVRQPPGKGLEWIGEVHHSGVTTYKPSLKSRVTISVDNSKNQLSKLTSVTAADTAVYYXAREFADDAFDIWGRGTMVTVSS

SEQ ID NO: 137 - protein, 117 aa, Artificial Sequence
  Synthesized sequence with two or more selenocysteine residues substituted for two or more cysteine residues
  VARIANT (1)...(117): Xaa = selenocysteine or cysteine
EVQLVESGGGLVQPGGSLRLSXAASGFTFSSFGMHWVRQAPGKGLEWVAYISRGSSTIYYADTVKGRFTISRDNAKNSLYLQMNSLRAEDTAVYYXARGITTALDYWGQGTLVTVSS

SEQ ID NO: 138 - protein, 119 aa, Artificial Sequence
  Synthesized sequence with two or more selenocysteine residues substituted for two or more cysteine residues
  VARIANT (1)...(119): Xaa = selenocysteine or cysteine
EVKFEESGGGLVQPGGSMKLSXVASGFSFSNYWMNWVRQSPEKGLEWVAEIRLTSNKQAIYYAESVKGRFTISRDDSKSSVYLQMNNLRAEDTGIYYXASLFYDGYLHWGQGTLVTVSA

SEQ ID NO: 139 - protein, 131 aa, Artificial Sequence
  Synthesized sequence with two or more selenocysteine residues substituted for two or more cysteine residues
  VARIANT (1)...(131): Xaa = selenocysteine or cysteine
QVQLVQSGAEVKKPGSSVKVSXKASGGTFNSHAISWVRQAPGQGLEWMGGINPILGIANYAQKFQGRVTITADESTSTAYMELSSLRSEDTAVYYXARHYEIQIGRYGMNVYYLMYRFASWGQGTLVTVSS

SEQ ID NO: 140 - protein, 125 aa, Artificial Sequence
  Synthesized sequence with two or more selenocysteine residues substituted for two or more cysteine residues
  VARIANT (1)...(125): Xaa = selenocysteine or cysteine
QVQLQQSGPGLVKPSQTLSLTXAISGDSVSSNSAAWNWIRQSPSRGLEWLGRTYYRSKWYNDYAVSVKSRITINPDTSKNQFSLQLNSVTPEDTAVYYXAREVTGDLEDAFDIWGQGTMVTVSSA

SEQ ID NO: 141 - protein, 118 aa, Artificial Sequence
  Synthesized sequence with two or more selenocysteine residues substituted for two or more cysteine residues
  VARIANT (1)...(118): Xaa = selenocysteine or cysteine
EVQLVQSGGGVVRPGGSLRLPXAASGFTFDDYGMSWVRQAPGKGLEWVSGINWNGGSTGYADSVKGRFTISRDNAKNSLYLQMNSLRAEDTALYHXARGGDDAFDIWGQGTMVTVSSA

SEQ ID NO: 142 - protein, 119 aa, Artificial Sequence
  Synthesized sequence with two or more selenocysteine residues substituted for two or more cysteine residues
  VARIANT (1)...(119): Xaa = selenocysteine or cysteine
QVQLVQSGAEVKKPGASVKVSXKVSGYTLTEFAMHWVRQAPGKGLEWMGGFVPEDGETIYAQKFQGRVTMTEDTSTDTAYMELSSLRSEDTAVYYXATDPLYTPGLEPWGQGTTVTVSS

SEQ ID NO: 143 - protein, 119 aa, Artificial Sequence
  Synthesized sequence with two or more selenocysteine residues substituted for two or more cysteine residues
  VARIANT (1)...(119): Xaa = selenocysteine or cysteine
EVQLVQSGAEVKKPGATVKISXKVSGYTFTDYSMHWVRQAPGKGLKWMGWINTETGEPIYADDFKGRFTFTLDTSTSTAYMELSSLRSEDTAVYYXARNYDYDGYFDVWGQGTTVTVSS

SEQ ID NO: 144 - protein, 119 aa, Artificial Sequence
  Synthesized sequence with two or more selenocysteine residues substituted for two or more cysteine residues
  VARIANT (1)...(119): Xaa = selenocysteine or cysteine
QVQLVQSGAEVKRPGASVQVSXRASGYSINTYYMQWVRQAPGAGLEWMGVINPSGVTSYAQKFQGRVTLTNDTSTNTVYMQLNSLTSADTAVYYXARWALWGDFGMDVWGKGTLVTVSS

SEQ ID NO: 145 - protein, 118 aa, Artificial Sequence
  Synthesized sequence with two or more selenocysteine residues substituted for two or more cysteine residues
  VARIANT (1)...(118): Xaa = selenocysteine or cysteine
QVQLQESGPGILKPSQTLSLTXSFSGFSLSTSGMGVGWIRQPSGKGLERLAHIWWDDDKYYNPSLKSQLTISKDTSRNQVFLKIISVDTADTATYYXARKDYGSSYDYWGQGTTVTVS

SEQ ID NO: 146 - protein, 119 aa, Artificial Sequence
  Synthesized sequence with two or more selenocysteine residues substituted for two or more cysteine residues
  VARIANT (1)...(119): Xaa = selenocysteine or cysteine
EVKLLESGGGLVQPGGSLKLSXVVSGFDFRRNWMSWVRQAPGKGLEWIGEINPDSSKINYTPSLKDKFIISRDNAKNTLYLQVSTVRSEDTALYYXVRPVWMYAMDYWGQGTSVTVSSA

SEQ ID NO: 147 - protein, 118 aa, Artificial Sequence
  Synthesized sequence with two or more selenocysteine residues substituted for two or more cysteine residues
  VARIANT (1)...(118): Xaa = selenocysteine or cysteine
EVQLVESGAEVKKPGASVKVSXKASGYTFTNYIIHWVKQEPGQGLEWIGYFNPYNHGTKYNEKFKGRATLTADKSISTAYMELSSLRSEDTAVYYXARSGPYAWFDTWGQGTTVTVSS

SEQ ID NO: 148 - protein, 119 aa, Artificial Sequence
  Synthesized sequence with two or more selenocysteine residues substituted for two or more cysteine residues
  VARIANT (1)...(119): Xaa = selenocysteine or cysteine
QVQLQQSAPELARPGASVKMSXTASGYIFTNYPIHWVKQRPGQGLEWIGFIDPGGGYDEPDERFRDRATLTADKSSSTAYMQLSSLTSEDSAIYYXARRGGGYYLDYWGQGTTLTVSSA

SEQ ID NO: 149 - protein, 117 aa, Artificial Sequence
  Synthesized sequence with two or more selenocysteine residues substituted for two or more cysteine residues
  VARIANT (1)...(117): Xaa = selenocysteine or cysteine
QIQFVQSGPELKKPGETVKISXKASGYTFTNYGMNWVKQAPGKGLKWMGWINSYTGEPTYADDFKGRFAFSLETSASTAYLQINNLKNEDTATYFXARGASYAMDYWGQGTSVTVSS

SEQ ID NO: 150 - protein, 115 aa, Artificial Sequence
  Synthesized sequence with two or more selenocysteine residues substituted for two or more cysteine residues
  VARIANT (1)...(115): Xaa = selenocysteine or cysteine
QVHLQESGPGLVKPSETLSLTXTVSDDSISSYYWSWIRQPPGKGLEWIGHISYSGSANYNPSLKSRVTISVDTSKNQFSLKLSSVTAADTAVYYXANWDDAFNIWGQGTMVTVSS

SEQ ID NO: 151 - protein, 116 aa, Artificial Sequence
  Synthesized sequence with two or more selenocysteine residues substituted for two or more cysteine residues
  VARIANT (1)...(116): Xaa = selenocysteine or cysteine
QVQLEESGPGLVAPSQSLSITXTVSGFSLTGYGIYWVRQPPGKGLEWLGMIWGDGRTDYNSALKSRLSISKDNSKSQVFLKMNSLQTDDTARYYXARDYYGSKDYWGQGTTLTVSS

SEQ ID NO: 152 - protein, 121 aa, Artificial Sequence
  Synthesized sequence with two or more selenocysteine residues substituted for two or more cysteine residues
  VARIANT (1)...(121): Xaa = selenocysteine or cysteine
QVQLQQSGAELMKPGASVKMSXKAAGYTFSSYWIEWVRQRPGHGLEWIGEIFPGSDSTNYNEKFNDRATFTADTSSNTAYMQLSSLTSEDSAVYYXARPLYYGSSAWFAYWGQGTLVTVSA

SEQ ID NO: 153 - protein, 122 aa, Artificial Sequence
  Synthesized sequence with two or more selenocysteine residues substituted for two or more cysteine residues
  VARIANT (1)...(122): Xaa = selenocysteine or cysteine
QVQLVESGGGVVQPGRSLRLSXAASGFTFSRYGMHWVRQAPGKGLEWVAVISYDGSNKWYADSVKGRFTISRDNSKNTLFLQMHSLRAADTGVYYXAKDQLYFGSQSPGHYWVQGTLVTVSS

SEQ ID NO: 154 - protein, 118 aa, Artificial Sequence
  Synthesized sequence with two or more selenocysteine residues substituted for two or more cysteine residues
  VARIANT (1)...(118): Xaa = selenocysteine or cysteine
EVQLVESGGGLVKPGGSLKLSXAASGFTFSSYAMSWARQTPEKRLEWVATISSGGSYTYYPDSVRGRFTISRDNAKNTLYLQMXSLRSEDTAMYYXARFDGYYAMDYWGQGTSVTVSS

SEQ ID NO: 155 - protein, 111 aa, Artificial Sequence
  Synthesized sequence with two or more selenocysteine residues substituted for two or more cysteine residues
  VARIANT (1)...(111): Xaa = selenocysteine or cysteine
EVQLQQSGSELVKPGASVKMSXKASGYTFTDYFMKWVKQSHGKSLEWIGDINPNNGDTFYIQKFKGKATLTVDKSSSTAYMQLNSLTSEDSAVYYXSRDLAYWGQGTLVAV

SEQ ID NO: 156 - protein, 117 aa, Artificial Sequence
  Synthesized sequence with two or more selenocysteine residues substituted for two or more cysteine residues
  VARIANT (1)...(117): Xaa = selenocysteine or cysteine
EVRLQQSGADLVKPGASVKLSXTASGFIIKATYMHWVRQRPEQGLEWIGRIDPANGETKYDPKFQVKATITADTSSSTAYLQLNSLTSDDTAVYYXARYAWYFDVWGAGTTVTVSSA

SEQ ID NO: 157 - protein, 123 aa, Artificial Sequence
  Synthesized sequence with two or more selenocysteine residues substituted for two or more cysteine residues
  VARIANT (1)...(123): Xaa = selenocysteine or cysteine
QVQLQQPGAELVKPGASVKLSXKASGYTFTNYWMYWVKQRPGQGLEWIGMIHPNSGSTNYNGKFKTGATLTVDKSSSTVYMQLSSLTSEDSAVYYXARWGYGGNYDYAMDYWGQGTSVTVSSA

SEQ ID NO: 158 - protein, 110 aa, Artificial Sequence
  Synthesized sequence with two or more selenocysteine residues substituted for two or more cysteine residues
  VARIANT (1)...(110): Xaa = selenocysteine or cysteine
QVQLVESGGGVVQPGRSLRLSXAASGFTFSSYAMHWVRQAPGKGLEWVAVISYDGSNKYYADSVKGRFTISRDNSKNTLYLQMNSLRAEDTAVYYXARDRLAVAGRPFDY

SEQ ID NO: 159 - protein, 119 aa, Artificial Sequence
  Synthesized sequence with two or more selenocysteine residues substituted for two or more cysteine residues
  VARIANT (1)...(119): Xaa = selenocysteine or cysteine
QVQLQQSGAELMKPGASVKISXKATGYKFSSYWIEWVKQRPGHGLEWIGEILPGSDTTNYNEKFKDKATFTSDTSSNTAYMQLSSLTSEDSAVYYXARDRGNYRAWFGYWGQGTLVTVS

SEQ ID NO: 160 - protein, 117 aa, Artificial Sequence
  Synthesized sequence with two or more selenocysteine residues substituted for two or more cysteine residues
  VARIANT (1)...(117): Xaa = selenocysteine or cysteine
EVQLLESGGGLVQPGGSLRLSXAASGFTFSSYAMSWVRQAPGKGLEWVSAISGSGGSTYYADSVKGRFTISRDNSKNTLYLQMNSLRAEDTAVYYXAKWGDGTLNPWGQGTMVTVSS

SEQ ID NO: 161 - protein, 116 aa, Artificial Sequence
  Synthesized sequence with two or more selenocysteine residues substituted for two or more cysteine residues
  VARIANT (1)...(116): Xaa = selenocysteine or cysteine
EVQLVESGGGLVQPGGSLRLSXAASGFTFSNYGMSWVRQAPGKGLEWVASISSGGGSTYYPDNVKGRFTISRDNAKNSLYLQMNSLRAEDTAVYYXARGGAGIDYWGQGTLVTVSS

SEQ ID NO: 162 - protein, 119 aa, Artificial Sequence
  Synthesized sequence with two or more selenocysteine residues substituted for two or more cysteine residues
  VARIANT (1)...(119): Xaa = selenocysteine or cysteine
EVQLVESGGGLVQPGGSLRLSXAASGYTFTNFGMNWVRQAPGKGLEWVAWINTNTGEPRYAEEFKGRFTISRDNAKNSLYLQMNSLRAEDTAVYYXARDWDGAYFFDYWGQGTLVTVSS

SEQ ID NO: 163 - protein, 121 aa, Artificial Sequence
  Synthesized sequence with two or more selenocysteine residues substituted for two or more cysteine residues
  VARIANT (1)...(121): Xaa = selenocysteine or cysteine
QVQLQQSGAELMKPGASVKISXKATGYTFSNYWMEWVKQRPGHGLEWIGEILPGRGRTNYNENFKGKATFTADTSSNTVYMQLNSLTSEDSAVYYXARFHSSAYYYTMDYWGQRTSVTVSS

SEQ ID NO: 164 - protein, 123 aa, Artificial Sequence
  Synthesized sequence with two or more selenocysteine residues substituted for two or more cysteine residues
  VARIANT (1)...(123): Xaa = selenocysteine or cysteine
QVQLQQPGSVVVRPGASVKLSXKASGYTFTSSWMHWAKQRPGQGLEWIGQIHPNSGNTNYNEKFKVKATLTIDTSSSTAYVDLNSLTSGDSAVYYXARGDDAYYSGLYAMDYWGQGTSVTVSS

SEQ ID NO: 165 - protein, 117 aa, Artificial Sequence
  Synthesized sequence with two or more selenocysteine residues substituted for two or more cysteine residues
  VARIANT (1)...(117): Xaa = selenocysteine or cysteine
QVQLQESGPGLVKPSETLSLTXTVSGYSITGGYLWNWIRQPPGKGLEWIGYISYDGTNNYKPSLKDRVTISRDTSKNQFSLKLSSVTAADTAVYYXARYGRVFFDYWGQGTLVTVSS

SEQ ID NO: 166 - protein, 114 aa, Artificial Sequence
  Synthesized sequence with two or more selenocysteine residues substituted for two or more cysteine residues
  VARIANT (1)...(114): Xaa = selenocysteine or cysteine
QVQLQQSGGGVVQPGRSLGLSXAASGFTFSSYGMNWVRQAPGKGLEWVSYISSSSSTIYYADSVKGRFTISRDNSKNTLYLQMNSLRAEDTAVYYXARGPGMDVWGQGTTVTVS

SEQ ID NO: 167 - protein, 117 aa, Artificial Sequence
  Synthesized sequence with two or more selenocysteine residues substituted for two or more cysteine residues
  VARIANT (1)...(117): Xaa = selenocysteine or cysteine
QVQLVQSGGGLVKPGGSLRLSXAASGFTFSSYSMNWVRQAPGKGLEWVANIKPDGSERHSVDSVKGRFTISRDNSKNSLYLQMNSLRAEDTAVYYXARPGAGRLDYWGQGTLVTVSS

SEQ ID NO: 168 - protein, 128 aa, Artificial Sequence
  Synthesized sequence with two or more selenocysteine residues substituted for two or more cysteine residues
  VARIANT (1)...(128): Xaa = selenocysteine or cysteine
EVQLVESGGGLVQPGGSLRLSXAASGFTFTSTGISWVRQAPGKGLEWVGRIYPTNGSTNYADSVKGRFTISADTSKNTAYLQMNSLRAEDTAVYYXARTYGIYDLYVDYTEYVMDYWGQGTLVTVSSA

SEQ ID NO: 169 - protein, 119 aa, Artificial Sequence
  Synthesized sequence with two or more selenocysteine residues substituted for two or more cysteine residues
  VARIANT (1)...(119): Xaa = selenocysteine or cysteine
QVQLQESGPGLVKPSETLSLTXAVSGYSIRSGYWWSWIRQPPGKGLEWIGQIYNKGNTDNNPALKSRVTISVDTSKNQFSLKLSSVTAADTAVYYXARVFWDDAYFDVWGQGTMVTVSS

SEQ ID NO: 170 - protein, 116 aa, Artificial Sequence
  Synthesized sequence with two or more selenocysteine residues substituted for two or more cysteine residues
  VARIANT (1)...(116): Xaa = selenocysteine or cysteine
EVQLLESGGGLVQPGGSLRLSXAASGFTFSSFAMSWVRQAPGKGLEWVSGISGSGGGTHYADSVKGRFTISRDNSKNMVYLQMNSLRAEDTAAYYXAKEAYKWQPWGQGTLVTVSS

SEQ ID NO: 171 - protein, 126 aa, Artificial Sequence
  Synthesized sequence with two or more selenocysteine residues substituted for two or more cysteine residues
  VARIANT (1)...(126): Xaa = selenocysteine or cysteine
EEQLVESGGDLVQPGRSLRLSXAASGFTFHDYTMHWVRQAPGKGLEWVSGISWNSGSLGYADSVKGRFTISRDNAKKSLYLQMNSLRAEDTALYYXAKDPSYGSGSYHSYYGMDVWGQGTTVTVSS

SEQ ID NO: 172 - protein, 118 aa, Artificial Sequence
  Synthesized sequence with two or more selenocysteine residues substituted for two or more cysteine residues
  VARIANT (1)...(118): Xaa = selenocysteine or cysteine
EVQLLESGGGLVHPGGSLRLSXAASGFTFGGYAMSWVRQAPGKGLEWVSLISGSGGSTYYADSVKGRFTIFRDNSKNTLYLQMISLRAEDSAVYYXAKYSNYDYFDPWGQGTLVTVSS

SEQ ID NO: 173 - protein, 120 aa, Artificial Sequence
  Synthesized sequence with two or more selenocysteine residues substituted for two or more cysteine residues
  VARIANT (1)...(120): Xaa = selenocysteine or cysteine
QVQLQESGPGLVKPSQTLSLTXTVSGGSISSGDYYWNWIRQYPGKGLELIGYIYYSGITYYNPSLKSRLTISLDTSKNQFSLKLSSVTAADTAVYYXARDRVELRAFDIWGQGTMVTVSS

SEQ ID NO: 174 - protein, 119 aa, Artificial Sequence
  Synthesized sequence with two or more selenocysteine residues substituted for two or more cysteine residues
  VARIANT (1)...(119): Xaa = selenocysteine or cysteine
QVQLVESGGGVVQPGRSLRLSXVASGFTFSRYGIHWVRQAPGKGLEWVIVISYDGINKYYADSVKGRFTISRDNSKNTVYLQMNSLRAEDTAVYYXAKGDFWSGYFDYWGQGTLVTVSS

SEQ ID NO: 175 - protein, 129 aa, Artificial Sequence
  Synthesized sequence with two or more selenocysteine residues substituted for two or more cysteine residues
  VARIANT (1)...(129): Xaa = selenocysteine or cysteine
QVQLVESGAEVKKPGASVKVSXKASGYTFTGYYMHWVRQAPGQGLEWMGWINPNSGGTNYAQKFQGRVTMTRDTSISTAYMELSRLRSDDTAVYYXARSPNPYYYDSSGYYYPGAFDIWGQGTMVTVSS

SEQ ID NO: 176 - protein, 117 aa, Artificial Sequence
  Synthesized sequence with two or more selenocysteine residues substituted for two or more cysteine residues
  VARIANT (1)...(117): Xaa = selenocysteine or cysteine
QVQLVESGGGLVQPGGSLRLSXAASGFTFSNYWVNWVRQAPGKGLEWVSLISYDGSNTHYADSVKGRFTISRDNSKNTLYLQMNSLRAEDTAVYYXARGRFYNFDYWGQGTLVTVSS

SEQ ID NO: 177 - protein, 115 aa, Artificial Sequence
  Synthesized sequence with two or more selenocysteine residues substituted for two or more cysteine residues
  VARIANT (1)...(115): Xaa = selenocysteine or cysteine
QVQLQQSGPELVRPGVSVKISXKGSGYTFTDYAMHWVKQSHAKSLEWIGVISTKYGKTNYNQKFKGKATMTVDKSSSTAYMELARLTSEDSAIYYXARGDDGYSWGQGTSVTVSS

SEQ ID NO: 178 - protein, 117 aa, Artificial Sequence
  Synthesized sequence with two or more selenocysteine residues substituted for two or more cysteine residues
  VARIANT (1)...(117): Xaa = selenocysteine or cysteine
EVKLVESGGGLVQPGGSLRLSXATSGFTFTDYYMSWVRQPPGKALEWLGFIRNKANGYTTEYSASVKGRFTISRDNSQSILYLQMDTLRAEDSATYYXARDNWFAYWGQGTLVTVSA

SEQ ID NO: 179 - protein, 122 aa, Artificial Sequence
  Synthesized sequence with two or more selenocysteine residues substituted for two or more cysteine residues
  VARIANT (1)...(122): Xaa = selenocysteine or cysteine
QVQLQQWGAGLLKPSETLSLTXAVYGGSFSGYNWHWIRQPPGKGLEWIGEITHSGSTNYNPSLKSRVTISVDTSKNQFSLKLSSVTAADTAVYYXVREIAVAGTGYYGMDVWGQGTTVTVSS

SEQ ID NO: 180 - protein, 114 aa, Artificial Sequence
  Synthesized sequence with two or more selenocysteine residues substituted for two or more cysteine residues
  VARIANT (1)...(114): Xaa = selenocysteine or cysteine
DVQLQESGPGLVKPSQSLSLTXSVTGYSITSGYYWNWIRQFPGNKLEWMGYISYDGSNNYNPSLKNRISITRDTSKNQFFLKLNSVTTEDTATYYXAILGRGYWGQGTTLTVSS

SEQ ID NO: 181 - protein, 119 aa, Artificial Sequence
  Synthesized sequence with two or more selenocysteine residues substituted for two or more cysteine residues
  VARIANT (1)...(119): Xaa = selenocysteine or cysteine
EVQLVQSGAEVKKPGASVKVSXKASGYSFTGYFMNWVRQAPGQGLEWIGRINPYTGDTFYNQKFKGRVTITVDKSTSTAYMELSSLRSEDTAVYYXGRLGSRYWYFDVWGQGTTVTVSS

SEQ ID NO: 182 - protein, 119 aa, Artificial Sequence
  Synthesized sequence with two or more selenocysteine residues substituted for two or more cysteine residues
  VARIANT (1)...(119): Xaa = selenocysteine or cysteine
QVQLVQSGAEVKKPGASVKVSXKVSGYTFTDYYMNWVRQAPGQGLEWIGDINPNNGGAIYNQKFKGRATLTVDKSTSTAYMELRSLRSDDTAVYYXTSGIITEIAEDFWGQGTLVTVSS

SEQ ID NO: 183 - protein, 120 aa, Artificial Sequence
  Synthesized sequence with two or more selenocysteine residues substituted for two or more cysteine residues
  VARIANT (1)...(120): Xaa = selenocysteine or cysteine
QVQLVQSGAEVKKPGASVKVSXKASGYIFTDYAMHWVRQAPGQGLEWMGTFIPLLDTSDYNQNFKGRVTMTTDTSTSTAYMELRSLRSDDTAVYYXARMGVTHSYVMDAWGQGTLVTVSS

SEQ ID NO: 184 - protein, 117 aa, Artificial Sequence
  Synthesized sequence with two or more selenocysteine residues substituted for two or more cysteine residues
  VARIANT (1)...(117): Xaa = selenocysteine or cysteine
DVQLQESGPGLVKPSQSLSLTXTVTAYSVTSDYAWNWIRQFPGNKLEWMGYISYSGTTRYNPSLKSRISITRDTSKNQFFLQLNSMTAEDTATYYXSRQGRGFPYWGQGTLVTVSAA

SEQ ID NO: 185 - protein, 119 aa, Artificial Sequence
  Synthesized sequence with two or more selenocysteine residues substituted for two or more cysteine residues
  VARIANT (1)...(119): Xaa = selenocysteine or cysteine
EVQLQQSGPELVKPGASVKMSXKASGYTFTSYVMHWVKQKPGQGLEWIGYIIPYNDGTKYNEKFKGKATLTSDKSSSTAYMELSSLTSEDSAVYYXARSEDYDHFDYWGQGTTVTVSSA

SEQ ID NO: 186 - protein, 120 aa, Artificial Sequence
  Synthesized sequence with two or more selenocysteine residues substituted for two or more cysteine residues
  VARIANT (1)...(120): Xaa = selenocysteine or cysteine
EVQLVESGGGLVQPGGSLRLSXAASGFTFSSYGMHWVRQAPGKGLEWVAYITTRSSTIYYADSVKGRFTISRDNAKNSLYLQMNSLRAEDTAVYYXTREPLTGYYAMDYWGQGTSVTVSS

SEQ ID NO: 187 - protein, 117 aa, Artificial Sequence
  Synthesized sequence with two or more selenocysteine residues substituted for two or more cysteine residues
  VARIANT (1)...(117): Xaa = selenocysteine or cysteine
QAQLQQSGPELVKPGALVKISXKASGYIFTNYDINWVKQRPGQGLEWIGLIYPGDGSIKYNEKFKGKATLTADKSSSTAYMQLSSQTSENSAVYFXARSGPYYFDYLGPRHHSHSSR

SEQ ID NO: 188 - protein, 118 aa, Artificial Sequence
  Synthesized sequence with two or more selenocysteine residues substituted for two or more cysteine residues
  VARIANT (1)...(118): Xaa = selenocysteine or cysteine
EVMLVESGGALVKPGGSLKLSXAASGFTFSNYAMSWVRQIPEKRLEWVATISSGGSHTYYLDSVKGRFTISRDNARDTLYLQMSSLRSEDTALYYXARLFTGYAMDYWGQGTSVTVSS

SEQ ID NO: 189 - protein, 117 aa, Artificial Sequence
  Synthesized sequence with two or more selenocysteine residues substituted for two or more cysteine residues
  VARIANT (1)...(117): Xaa = selenocysteine or cysteine
EIQLQQSGPELVKPGASVQVSXKTSGYSFTDYNVYWVRQSHGKSLEWIGYIDPYNGITIYDQNFKGKATLTVDKSSTTAFMHLNSLTSDDSAVYFXARDVTTALDFWGQGTTLTVSS

SEQ ID NO: 190 - protein, 119 aa, Artificial Sequence
  Synthesized sequence with two or more selenocysteine residues substituted for two or more cysteine residues
  VARIANT (1)...(119): Xaa = selenocysteine or cysteine
QVQLQQSGAELARPGASVKMSXKASGYTFTSYTMHWVKQRPGQGLEWIGYINPSSGYTNYNQKFKDKATLTADKSSSTAYMQLSSLTSEDSAVYYXARWRDAYYAMDYWGQGTSVTVSS

SEQ ID NO: 191 - protein, 121 aa, Artificial Sequence
  Synthesized sequence with two or more selenocysteine residues substituted for two or more cysteine residues
  VARIANT (1)...(121): Xaa = selenocysteine or cysteine
QAYLQQSGAESVRPGASVKMSXKASGYTFTSYNMHWVKQTPRQGLEWIGAIYPGNGDTSYNQKFKGKATLTVDKSSSTAYMQLSSLTSEDSAVYFXARVVYYSNSYWYFDVWGTGTTVTVS

SEQ ID NO: 192 - protein, 120 aa, Artificial Sequence
  Synthesized sequence with two or more selenocysteine residues substituted for two or more cysteine residues
  VARIANT (1)...(120): Xaa = selenocysteine or cysteine
AVTLDESGGGLQTPGGGLSLVXKASGFTFSSFDMGWVRQAPGKGLEFVAQINDAGSRTWYATAVKGRATISRDNGQTTVRLQLNNLRAEDTGTYYXTRGSGYVGAGAIDAWGHGTEVIVS

SEQ ID NO: 193 - protein, 116 aa, Artificial Sequence
  Synthesized sequence with two or more selenocysteine residues substituted for two or more cysteine residues
  VARIANT (1)...(116): Xaa = selenocysteine or cysteine
EFQQSGPELVEPGASVKISXKASGYSFTDYNMNWVKQSNGKSLEWIGVINPNYGTTSYNQKFKGKATLTVDQSSSTAYMQLNSLTSEDSAVYYXARFDGYYGYYFDYWGQGTTLTV

SEQ ID NO: 194 - protein, 124 aa, Artificial Sequence
  Synthesized sequence with two or more selenocysteine residues substituted for two or more cysteine residues
  VARIANT (1)...(124): Xaa = selenocysteine or cysteine
EVQLLESGAEVKRPGSSVRVSXQVSGYSFTAYYVSWVRQTPGHGLEWMGGINPDNGGNNYAQKFHGRVTFIADESTRTVHMELRSLRSEDTAVYFXAKSTSYDYDGYWYFDVWGQGTAVTVFSS

SEQ ID NO: 195 - protein, 116 aa, Artificial Sequence
  Synthesized sequence with two or more selenocysteine residues substituted for two or more cysteine residues
  VARIANT (1)...(116): Xaa = selenocysteine or cysteine
QVQLQESGPGLVRPSQTLSLTXTVSGFTFTYYGVHWVRQPPGRGLEWIGIIWAGGNTNYNSTLKSRATMLVDTSKNQFSLRLSSVTAADTAVYYXARDDYAAMDYWGQGSLVTVSS

SEQ ID NO: 196 - protein, 119 aa, Artificial Sequence
  Synthesized sequence with two or more selenocysteine residues substituted for two or more cysteine residues
  VARIANT (1)...(119): Xaa = selenocysteine or cysteine
QVTLKESGPGILQPSQTLSLTXSFSGFSLSTFGMGVGWIRQPSGKGLEWLAHIWWDDDKYYSPALKSRLTISKDTSKNQVFLKIANVDTADTATYYXVRIGSRSPFAYWGPGTLVTVSS

SEQ ID NO: 197 - protein, 117 aa, Artificial Sequence
  Synthesized sequence with two or more selenocysteine residues substituted for two or more cysteine residues
  VARIANT (1)...(117): Xaa = selenocysteine or cysteine
QVQLQQSGAELVKPGASVKLSXKTSGYTFSNYYMSWLKQMPGQNIEWIGNIYGGNGGTGYNQKFKGKATLTVDKSSSTAYMQLSSLTSEDSAVYFXARGDLYAMDYWGQGTTVTVSS

SEQ ID NO: 198 - protein, 122 aa, Artificial Sequence
  Synthesized sequence with two or more selenocysteine residues substituted for two or more cysteine residues
  VARIANT (1)...(122): Xaa = selenocysteine or cysteine
EVQLHQSGPELVKPGASVKISXKTSGYTFTEYTMHWVKQSHGKSLEWIGGVNPYNDNTSYIRKLQGKVTLTVDRSSSTAYMELRSLTSEDSAVYFXARYGGLRPYYFPMDFWGQGTSVTVSS

SEQ ID NO: 199 - protein, 119 aa, Artificial Sequence
  Synthesized sequence with two or more selenocysteine residues substituted for two or more cysteine residues
  VARIANT (1)...(119): Xaa = selenocysteine or cysteine
QVQLKESGPGLVAPSQSLSITXTVSGFSLTTYGVHWIRQPPGKGLEWLVVIWSDGYTTYNSALKSRLSITKDNSKSQVFLKMNSLQTDDTAMYYXARNDGDYFYSMDYWGQGTSVTVSS

SEQ ID NO: 200 - protein, 119 aa, Artificial Sequence
  Synthesized sequence with two or more selenocysteine residues substituted for two or more cysteine residues
  VARIANT (1)...(119): Xaa = selenocysteine or cysteine
EVQLQESGPGLVKPSQTLSLTXTVTGYSITSDYAWNWIRQPPGKKLEWMGYINYSGSTSYNPSLKSRVTISRDTSKNQFSLKLSSVTAADTAVYYXARWIGSSAWYFDVWGQGTLVTVS

SEQ ID NO: 201 - protein, 120 aa, Artificial Sequence
  Synthesized sequence with two or more selenocysteine residues substituted for two or more cysteine residues
  VARIANT (1)...(120): Xaa = selenocysteine or cysteine
EVQLLESGGDLVQPGGSLRLSXAASGFTFSNYAMSWVRQAPGKGLEWVSAITPSGGSTNYADSVKGRFTISRDNSQNTLYLQMNSLRVEDTAVYYXGRVPYRSTWYPLYWGQGTLVTVSS

SEQ ID NO: 202 - protein, 118 aa, Artificial Sequence
  Synthesized sequence with two or more selenocysteine residues substituted for two or more cysteine residues
  VARIANT (1)...(118): Xaa = selenocysteine or cysteine
EVQLQQSGPELVKPGASVKISXKASGYTFTGYYMHWVKQSPEKSLEWIGEINPSTGGTTYNQKFTGKATLTVDKSSSTAYMQLKSLTSDDSAVYYXASYYRYDWFAYWGQGTLVTVSA

SEQ ID NO: 203 - protein, 121 aa, Artificial Sequence
  Synthesized sequence with two or more selenocysteine residues substituted for two or more cysteine residues
  VARIANT (1)...(121): Xaa = selenocysteine or cysteine
EVQLVESGGGLVQPGRSLRLSXAASGFTFDDYAMHWVRQAPGKGLEWVSAITWNSGHIDYADSVEGRFTISRDNAKNSLYLQMNSLRAEDTAVYYXAKVSYLSTASSLDYWGQGTLVTVSS

SEQ ID NO: 204 - protein, 116 aa, Artificial Sequence
  Synthesized sequence with two or more selenocysteine residues substituted for two or more cysteine residues
  VARIANT (1)...(116): Xaa = selenocysteine or cysteine
QLQQSGTVLARPGASVKMSXKASGYSFTRYWMHWIKQRPGQGLEWIGAIYPGNSDTSYNQKFEGKAKLTAVTSASTAYMELSSLTHEDSAVYYXSRDYGYYFDFWGQGTTLTVSSA

SEQ ID NO: 205 - protein, 124 aa, Artificial Sequence
  Synthesized sequence with two or more selenocysteine residues substituted for two or more cysteine residues
  VARIANT (1)...(124): Xaa = selenocysteine or cysteine
QVQLQQSGAEVKKPGSSVRVSXKASGGTFNNNAINWVRQAPGQGLEWMGGIIPMFGTAKYSQNFQGRVAITADESTGTASMELSSLRSEDTAVYYXARSRDLLLFPHHALSPWGRGTMVTVSSG

SEQ ID NO: 206 - protein, 125 aa, Artificial Sequence
  Synthesized sequence with two or more selenocysteine residues substituted for two or more cysteine residues
  VARIANT (1)...(125): Xaa = selenocysteine or cysteine
QVQLQQSGAELVRPGSSVKISXKASGYAFSSYWMNWVKQRPGQGLEWIGQIWPGDGDTNYNGKFKGKATLTADESSSTAYMQLSSLASEDSAVYFXARRETTTVGRYYYAMDYWGQGTTVTVSSG

SEQ ID NO: 207 - protein, 118 aa, Artificial Sequence
  Synthesized sequence with two or more selenocysteine residues substituted for two or more cysteine residues
  VARIANT (1)...(118): Xaa = selenocysteine or cysteine
QVQLVESGGGVVQPGRSLRLSXAASGFTFSVYGMNWVRQAPGKGLEWVAIIWYDGDNQYYADSVKGRFTISRDNSKNTLYLQMNGLRAEDTAVYYXARDLRTGPFDYWGQGTLVTVSS

SEQ ID NO: 208 - protein, 119 aa, Artificial Sequence
  Synthesized sequence with two or more selenocysteine residues substituted for two or more cysteine residues
  VARIANT (1)...(119): Xaa = selenocysteine or cysteine
QVQLVQSGAEVKKPGETVKISXKASDYTFTYYGMNWVKQAPGQGLKWMGWIDTTTGEPTYAQKFQGRIAFSLETSASTAYLQIKSLKSEDTATYFXARRGPYNWYFDVWGQGTTVTVSS

SEQ ID NO: 209 - protein, 119 aa, Artificial Sequence
  Synthesized sequence with two or more selenocysteine residues substituted for two or more cysteine residues
  VARIANT (1)...(119): Xaa = selenocysteine or cysteine
EVQLVESGGGLVQPGGSLRLSXAASGYVFTDYGMNWVRQAPGKGLEWMGWINTYIGEPIYADSVKGRFTFSLDTSKSTAYLQMNSLRAEDTAVYYXARGYRSYAMDYWGQGTLVTVSSA

SEQ ID NO: 210 - protein, 120 aa, Artificial Sequence
  Synthesized sequence with two or more selenocysteine residues substituted for two or more cysteine residues
  VARIANT (1)...(120): Xaa = selenocysteine or cysteine
QVQLKQSGPGLVQPSQSLSITXTVSGFSLTNYGVHWVRQSPGKGLEWLGVIWSGGNTDYNTPFTSRLSINKDNSKSQVFFKMNSLQSNDTAIYYXARALTYYDYEFAYWGQGTLVTVSAA

SEQ ID NO: 211 - protein, 117 aa, Artificial Sequence
  Synthesized sequence with two or more selenocysteine residues substituted for two or more cysteine residues
  VARIANT (1)...(117): Xaa = selenocysteine or cysteine
EVQLVQSGPGLVQPGGSVRISXAASGYTFTNYGMNWVKQAPGKGLEWMGWINTYTGESTYADSFKGRFTFSLDTSASAAYLQINSLRAEDTAVYYXARFAIKGDYWGQGTLLTVSSA

SEQ ID NO: 212 - protein, 119 aa, Artificial Sequence
  Synthesized sequence with two or more selenocysteine residues substituted for two or more cysteine residues
  VARIANT (1)...(119): Xaa = selenocysteine or cysteine
EVQLVESGGGLVQPGGSLRLSXAVSGFSSTNYHVHWVRQAPGKGLEWMGVIWGDGDTSYNSVLKSRFTISRDTSKNTVYLQMNSLRAEDTAVYYXARQLTHYYVLAAWGQGTLVTVSSA

SEQ ID NO: 213 - protein, 122 aa, Artificial Sequence
  Synthesized sequence with two or more selenocysteine residues substituted for two or more cysteine residues
  VARIANT (1)...(122): Xaa = selenocysteine or cysteine
EVQLLESGGGLVQPGGSLRLSXAASGFTFSSYAMSWVRQAPGKGLEWVSGITGSGGSTYYADSVKGRFTISRDNSKNTLYLQMNSLRAEDTAVYYXAKDPGTTVIMSWFDPWGQGTLVTVSS

SEQ ID NO: 214 - protein, 122 aa, Artificial Sequence
  Synthesized sequence with two or more selenocysteine residues substituted for two or more cysteine residues
  VARIANT (1)...(122): Xaa = selenocysteine or cysteine
EVQLVESGGGLVQPGGSLRLSXAASGYSFTGHWMNWVRQAPGKGLEWVGMIHPSDSETRYNQKFKDRFTISVDKSKNTLYLQMNSLRAEDTAVYYXARGIYFYGTTYFDYWGQGTLVTVSSA

SEQ ID NO: 215 - protein, 123 aa, Artificial Sequence
  Synthesized sequence with two or more selenocysteine residues substituted for two or more cysteine residues
  VARIANT (1)...(123): Xaa = selenocysteine or cysteine
QVTLKESGPGILKPSQTLSLTXSFSGFSLSTSGMGVGWIRQPSGKGLEWLAHIWWDDDKYYNPSLKSQLTISKDTSRNQVFLKITSVDTADTATYYXARSYDDYLYYALDYWGQGTSVTVSSA

SEQ ID NO: 216 - protein, 123 aa, Artificial Sequence
  Synthesized sequence with two or more selenocysteine residues substituted for two or more cysteine residues
  VARIANT (1)...(123): Xaa = selenocysteine or cysteine
EVQLLESGGGLVQPGGSLRLSXAASGFTFSSYAMSWVRQAPGKGLEWVSAISGSGGSTYYADSVKGRFTISRDNSKNTLYLQMNSLRAEDTAVYYXAKDGSSGWYVPHWFDPWGQGTLVTVSS

SEQ ID NO: 217 - protein, 126 aa, Artificial Sequence
  Synthesized sequence with two or more selenocysteine residues substituted for two or more cysteine residues
  VARIANT (1)...(126): Xaa = selenocysteine or cysteine
QVQLVESGGGVVQPGRSLRLSXAASGFIFSSYAMHWVRQAPGNGLEWVAFMSYDGSNKKYADSVKGRFTISRDNSKNTLYLQMNSLRAEDTAVYYXARDRGIAAGGNYYYYGMDVWGQGTTVTVSS

SEQ ID NO: 218 - protein, 121 aa, Artificial Sequence
  Synthesized sequence with two or more selenocysteine residues substituted for two or more cysteine residues
  VARIANT (1)...(121): Xaa = selenocysteine or cysteine
QVQLVESGGGLVQPGRSLRLSXAASGFTFDDYAMHWVRQAPGKGLDWVSAITWNSGHIDYADSVEGRFAVSRDNAKNALYLQMNSLRPEDTAVYYXTKASYLSTSSSLDNWGQGTLVTVSS

SEQ ID NO: 219 - protein, 121 aa, Artificial Sequence
  Synthesized sequence with two or more selenocysteine residues substituted for two or more cysteine residues
  VARIANT (1)...(121): Xaa = selenocysteine or cysteine
QVQLQQPGAELVKAGASVKMSXKASGYTFTSYNMHWVKQTPGRGLEWIGAIYPGNGDTSYNQKFKGKATLTADKSSSTAYMQLSSLTSEDSAVYYXARSTYYGGDWYFNVWGAGTTVTVSA

SEQ ID NO: 220 - protein, 119 aa, Artificial Sequence
  Synthesized sequence with two or more selenocysteine residues substituted for two or more cysteine residues
  VARIANT (1)...(119): Xaa = selenocysteine or cysteine
EVKLEESGGGLVQPGGSMKLSXVASGFIFSNHWMNWVRQSPEKGLEWVAEIRSKSINSATHYAESVKGRFTISRDDSKSAVYLQMTDLRTEDTGVYYXSRNYYGSTYDYWGQGTTLTVS

SEQ ID NO: 221 - protein, 118 aa, Artificial Sequence
  Synthesized sequence with two or more selenocysteine residues substituted for two or more cysteine residues
  VARIANT (1)...(118): Xaa = selenocysteine or cysteine
QVQLVESGGGVVQPGRSLRLSXAASGFTFSSYTMHWVRQAPGKGLEWVTFISYDGNNKYYADSVKGRFTISRDNSKNTLYLQMNSLRAEDTAIYYXARTGWLGPFDYWGQGTLVTVSS

SEQ ID NO: 222 - protein, 119 aa, Artificial Sequence
  Synthesized sequence with two or more selenocysteine residues substituted for two or more cysteine residues
  VARIANT (1)...(119): Xaa = selenocysteine or cysteine
EVQLVESGGGVVQPGRSLRLSXSASGFDFTTYWMSWVRQAPGKGLEWIGEIHPDSSTINYAPSLKDRFTISRDNAKNTLFLQMDSLRPEDTGVYFXASLYFGFPWFAYWGQGTPVTVSS

SEQ ID NO: 223 - protein, 118 aa, Artificial Sequence
  Synthesized sequence with two or more selenocysteine residues substituted for two or more cysteine residues
  VARIANT (1)...(118): Xaa = selenocysteine or cysteine
EVQLVESGGGLAKPGGSLRLSXAASGFRFTFNNYYMDWVRQAPGQGLEWVSRISSSGDPTWYADSVKGRFTISRENANNTLFLQMNSLRAEDTAVYYXASLTTGSDSWGQGVLVTVSS

SEQ ID NO: 224 - protein, 122 aa, Artificial Sequence
  Synthesized sequence with two or more selenocysteine residues substituted for two or more cysteine residues
  VARIANT (1)...(122): Xaa = selenocysteine or cysteine
QVQLVQSGAEVKKPGASVKVSXKASGYTFTSHWMHWVRQAPGQGLEWIGEFNPSNGRTNYNEKFKSKATMTVDTSTNTAYMELSSLRSEDTAVYYXASRDYDYAGRYFDYWGQGTLVTVSSA

SEQ ID NO: 225 - protein, 119 aa, Artificial Sequence
  Synthesized sequence with two or more selenocysteine residues substituted for two or more cysteine residues
  VARIANT (1)...(119): Xaa = selenocysteine or cysteine
QVTLRESGPALVKPTQTLTLTXTVSGFSLTSYSVHWVRQPPGKGLEWLGVIWASGGTDYNSALMSRLSISKDTSRNQVVLTMTNMDPVDTATYYXARDPPSSLLRLDYWGRGTPVTVSS

SEQ ID NO: 226 - protein, 125 aa, Artificial Sequence
  Synthesized sequence with two or more selenocysteine residues substituted for two or more cysteine residues
  VARIANT (1)...(125): Xaa = selenocysteine or cysteine
EVQLVESGGGLVKPGGSLKLSXAASGFAFSIYDMSWVRQTPEKXLEWVAYISSGGGTTYYPDTVKGRFTISRDNAKNTLYLQMSSLKSEDTAMYYXARHSGYGTHWGVLFAYWGQGTLVTVSAKA

SEQ ID NO: 227 - protein, 120 aa, Artificial Sequence
  Synthesized sequence with two or more selenocysteine residues substituted for two or more cysteine residues
  VARIANT (1)...(120): Xaa = selenocysteine or cysteine
VKLQQSGAELVKPGASVKLFXTASGFNIKDTYMHWVKQRPQQGLEWIGRIDPASGDTKYDPKFQVKATITADTSSNTAWLQLSSLTSEDTAVYYXADGMWVSTGYALDFWGQGTTVTVSS

SEQ ID NO: 228 - protein, 124 aa, Artificial Sequence
  Synthesized sequence with two or more selenocysteine residues substituted for two or more cysteine residues
  VARIANT (1)...(124): Xaa = selenocysteine or cysteine
QVQLQQSGAEVKKPGSSVKVSXKASGYTFTNYYIYWVRQAPGQGLEWIGGINPTSGGSNFNEKFKTRVTITADESSTTAYMELSSLRSEDTAFYFXTRQGLWFDSDGRGFDFWGQGTTVTVSSA

SEQ ID NO: 229 - protein, 123 aa, Artificial Sequence
  Synthesized sequence with two or more selenocysteine residues substituted for two or more cysteine residues
  VARIANT (1)...(123): Xaa = selenocysteine or cysteine
EVQLVESGGGLVQPGRSLRLSXAASGFTFNDYAMHWVRQAPGKGLEWVSTISWNSGSIGYADSVKGRFTISRDNAKKSLYLQMNSLRAEDTALYYXAKDIQYGNYYYGMDVWGQGTTVTVSSA

SEQ ID NO: 230 - protein, 117 aa, Artificial Sequence
  Synthesized sequence with two or more selenocysteine residues substituted for two or more cysteine residues
  VARIANT (1)...(117): Xaa = selenocysteine or cysteine
EVQLVQSGPGLVQPGGSVRISXAASGYTFTNYGMNWVKQAPGKGLEWMGWINTYTGESTYADSFKGRFTFSLDTSASAAYLQINSLRAEDTAVYYXARFAIKGDYWGQGTLLTVSSE

SEQ ID NO: 231 - protein, 117 aa, Artificial Sequence
  Synthesized sequence with two or more selenocysteine residues substituted for two or more cysteine residues
  VARIANT (1)...(117): Xaa = selenocysteine or cysteine
EVQLVQSGAEVKKPGESLKISXKGSGYSFTGYNMNWVRQMPGKGLEWMGNIDPYYGGTTYNRKFKGQVTISADKSISTAYLQWSSLKASDTAMYYXARSVGPFDSWGQGTLVTVSSG

SEQ ID NO: 232 - protein, 120 aa, Artificial Sequence
  Synthesized sequence with two or more selenocysteine residues substituted for two or more cysteine residues
  VARIANT (1)...(120): Xaa = selenocysteine or cysteine
EVQLVESGGGLVQPGGSLRLSXAASGFTFTDYTMDWVRQAPGKGLEWVADVNPNSGGSIYNQRFKGRFTLSVDRSKNTLYLQMNSLRAEDTAVYYXARNLGPSFYFDYWGQGTLVTVSSA

SEQ ID NO: 233 - protein, 117 aa, Artificial Sequence
  Synthesized sequence with two or more selenocysteine residues substituted for two or more cysteine residues
  VARIANT (1)...(117): Xaa = selenocysteine or cysteine
EVQLLESGGGLVQPGGSLRLSXAASGFTFSSFSMSWVRQAPGKGLEWVSSISGSSGTTYYADSVKGRFTISRDNSKNTLYLQMNSLRAEDTAVYYXAKPFPYFDYWGQGTLVTVSSG

SEQ ID NO: 234 - protein, 124 aa, Artificial Sequence
  Synthesized sequence with two or more selenocysteine residues substituted for two or more cysteine residues
  VARIANT (1)...(124): Xaa = selenocysteine or cysteine
EVQLVESGGGLVQPGGSLRLSXAASGYDFTHYGMNWVRQAPGKGLEWVGWINTYTGEPTYAADFKRRFTFSLDTSKSTAYLQMNSLRAEDTAVYYXAKYPYYYGTSHWYFDVWGQGTLVTVSSA

SEQ ID NO: 235 - protein, 119 aa, Artificial Sequence
  Synthesized sequence with two or more selenocysteine residues substituted for two or more cysteine residues
  VARIANT (1)...(119): Xaa = selenocysteine or cysteine
QVQLVQSGAEVVKPGASVKLSXKASGYIFTSYYMYWVKQAPGQGLEWIGEINPSNGDTNFNEKFKSKATLTVDKSASTAYMELSSLRSEDTAVYYXTRSDGRNDMDSWGQGTLVTVSSA

SEQ ID NO: 236 - protein, 123 aa, Artificial Sequence
  Synthesized sequence with two or more selenocysteine residues substituted for two or more cysteine residues
  VARIANT (1)...(123): Xaa = selenocysteine or cysteine
EEQVLESGGGLVKPGGSLRLSXAASGFTFSPYSVFWVRQAPGKGLEWVSSINSDSTYKYYADSVKGRFTISRDNAENSIFLQMNSLRAEDTAVYYXARDRSYYAFSSGSLSDYYYGLDVWGQG

SEQ ID NO: 237 - protein, 124 aa, Artificial Sequence
  Synthesized sequence with two or more selenocysteine residues substituted for two or more cysteine residues
  VARIANT (1)...(124): Xaa = selenocysteine or cysteine
QVQLVQSGAEVKKPGASVKVSXKTSRYTFTEYTIHWVRQAPGQRLEWIGGINPNNGIPNYNQKFKGRVTITVDTSASTAYMELSSLRSEDTAVYYXARRRIAYGYDEGHAMDYWGQGTLVTVSS

SEQ ID NO: 238 - protein, 123 aa, Artificial Sequence
  Synthesized sequence with two or more selenocysteine residues substituted for two or more cysteine residues
  VARIANT (1)...(123): Xaa = selenocysteine or cysteine
QVQLVQSGAEVKKPGASVKVSXKASGYTFTGYYMHWVRQAPGQGLEWMGRINPNSGGTNYAQKFQGRVTMTRDTSISTAYMELSRLRSDDTAVYYXARGRTEYIVVAEGFDYWGQGTLVTVSS

SEQ ID NO: 239 - protein, 121 aa, Artificial Sequence
  Synthesized sequence with two or more selenocysteine residues substituted for two or more cysteine residues
  VARIANT (1)...(121): Xaa = selenocysteine or cysteine
EVQLLEQSGAELVRPGTSVKISXKASGYAFTNYWLGWVKQRPGHGLEWIGDIFPGSGNIHYNEKFKGKATLTADKSSSTAYMQLSSLTFEDSAVYFXARLRNWDEPMDYWGQGTTVTVSSG

SEQ ID NO: 240 - protein, 122 aa, Artificial Sequence
  Synthesized sequence with two or more selenocysteine residues substituted for two or more cysteine residues
  VARIANT (1)...(122): Xaa = selenocysteine or cysteine
EVQLVQSGAEVKKPGESLKISXQSFGYIFIDHTIHWMRQMPGQGLEWMGAISPRHDITKYNEMFRGQVTISADKSSSTAYLQWSSLKASDTAMYFXARGGFYGSTIWFDFWGQGTMVTVSSA

SEQ ID NO: 241 - protein, 123 aa, Artificial Sequence
  Synthesized sequence with two or more selenocysteine residues substituted for two or more cysteine residues
  VARIANT (1)...(123): Xaa = selenocysteine or cysteine
QVQLVQSGAEVMKPGSSVKVSXKASGYTFSMYWLEWVRQAPGHGLEWMGEIDPGTFETNYNEKFKARVTFTADTSTSTAYMELSSLRSEDTAVYYXARFSHFSGSNYDYFDYWGQGTLVTVSS

SEQ ID NO: 242 - protein, 125 aa, Artificial Sequence
  Synthesized sequence with two or more selenocysteine residues substituted for two or more cysteine residues
  VARIANT (1)...(125): Xaa = selenocysteine or cysteine
QVQLVESGGGVVQPGRSLRLSXAASGFTFSTYGMHWVRQAPGKGLEWVAVIWDDGSYKYYGDSVKGRFTISRDNSKNTLYLQMNSLRAEDTAVYYXARDGITMVRGVMKDYFDYWGQGTLVTVSS

SEQ ID NO: 243 - protein, 112 aa, Artificial Sequence
  Synthesized sequence with two or more selenocysteine residues substituted for two or more cysteine residues
  VARIANT (1)...(112): Xaa = selenocysteine or cysteine
QVQLQQWGAGLLKPSETLSLTXAVYGGSFSGYYWSWIRQPPGKGLEWIGEINHSGSTNYNPSLKSRVTISVDTSKNQFSLKLSSVTAADTAVYYXARVINWFDPWGQGTLVT

SEQ ID NO: 244 - protein, 108 aa, Artificial Sequence
  Synthesized sequence with two or more selenocysteine residues substituted for two or more cysteine residues
  VARIANT (1)...(108): Xaa = selenocysteine or cysteine
DIQMTQTTSSLSASLGDRVTISXRASQDISNYLNWYQQKPDGTVKLLIYYTSRLHSGVTSRFSGSGSGTDYSLTISNLEQEDIATYFXQQGNTLPWTFGGGTKVEIKR

SEQ ID NO: 245 - protein, 112 aa, Artificial Sequence
  Synthesized sequence with two or more selenocysteine residues substituted for two or more cysteine residues
  VARIANT (1)...(112): Xaa = selenocysteine or cysteine
DIVMTQAAPSVPVTPGESVSISXRSTKSLLHSNGNTYLYWFLQRPGQSPQLLIYRMSNLASGVPDRFSGSGSGTAFTLRISRVEAEDVGVYYXMQHLEYPFTFGGGTKLEIK

SEQ ID NO: 246 - protein, 107 aa, Artificial Sequence
  Synthesized sequence with two or more selenocysteine residues substituted for two or more cysteine residues
  VARIANT (1)...(107): Xaa = selenocysteine or cysteine
DIQMTQSPSSLSASVGDRVTISXRASQDIRNYLNWYQQKPGKAPKLLIFYTSKLHSGVPSRFSGSGSGTDYTLTISSLQPEDIATYYXQQGNTLPLTFGGGTKVEIK

SEQ ID NO: 247 - protein, 109 aa, Artificial Sequence
  Synthesized sequence with two or more selenocysteine residues substituted for two or more cysteine residues
  VARIANT (1)...(109): Xaa = selenocysteine or cysteine
EIVMTQSPATLSVSPGERATLSXRASESISSNLAWYQQKPGQAPRLFIYTASTRATDIPARFSGSGSGTEFTLTISSLQSEDFAVYYXQQYNNWPSITFGQGTRLEIKR

SEQ ID NO: 248 - protein, 107 aa, Artificial Sequence
  Synthesized sequence with two or more selenocysteine residues substituted for two or more cysteine residues
  VARIANT (1)...(107): Xaa = selenocysteine or cysteine
EIVLTQSPGTLSLSPGERATLSXRASQSVSSSFLAWYQQKPGQAPRLLIYGASSRATGIPDRFSGSGSGTDFILTISRLEPEDFAVYYXQQYDSSFTFGPGTKVDIK

SEQ ID NO: 249 - protein, 109 aa, Artificial Sequence
  Synthesized sequence with two or more selenocysteine residues substituted for two or more cysteine residues
  VARIANT (1)...(109): Xaa = selenocysteine or cysteine
EIVLTQSPATLSLSPGERATLSXSAGSSVDSSYLYWYQQKPGQAPRLLIYSTSNLASGIPARFSGSGSGTDFTLTISSLEPEDFAVYYXHQWSSYPFTFGQGTKLEIKR

SEQ ID NO: 250 - protein, 108 aa, Artificial Sequence
  Synthesized sequence with two or more selenocysteine residues substituted for two or more cysteine residues
  VARIANT (1)...(108): Xaa = selenocysteine or cysteine
EIVLTQSPGTLSLSPGERATLSXRASQSVSSSYLAWYQQKPGQAPRLLIYGASRRATGIPDRFSGSGSGTDFTLTISRLEPEDFAVYYXQRYGSSHTFGQGTKLEISR

SEQ ID NO: 251 - protein, 108 aa, Artificial Sequence
  Synthesized sequence with two or more selenocysteine residues substituted for two or more cysteine residues
  VARIANT (1)...(108): Xaa = selenocysteine or cysteine
EIVLTQSPGTLSLSPGERATLSXRASQSVSSSYLAWYQQKPGQAPRLLIYGASSRATGIPDRFSGSGSGTDFTLTISRLEPEDFAVYYXQRSGGSSFTFGPGTKVDIK

SEQ ID NO: 252 - protein, 108 aa, Artificial Sequence
  Synthesized sequence with two or more selenocysteine residues substituted for two or more cysteine residues
  VARIANT (1)...(108): Xaa = selenocysteine or cysteine
DIQMTQSPSSLSASVGDRVTIKXQASQSISSRLAWYQQKPGKPPKLLIYRASTLASGVPSRFSGSGSGTDFTLTISSLQPEDVATYYXQXTGYGISWPIGGGTKVEIK

SEQ ID NO: 253 - protein, 110 aa, Artificial Sequence
  Synthesized sequence with two or more selenocysteine residues substituted for two or more cysteine residues
  VARIANT (1)...(110): Xaa = selenocysteine or cysteine
DIQMTQSPSSLSASVGDRVTISXQSSQSVYNNNYLAWFQQKPGKPPKLLIYGASNLASGVPSRFSGSGSGTQFTLTISSLQPEDVATYYXQGYYNGVIFVFGGGTKVEIK

SEQ ID NO: 254 - protein, 113 aa, Artificial Sequence
  Synthesized sequence with two or more selenocysteine residues substituted for two or more cysteine residues
  VARIANT (1)...(113): Xaa = selenocysteine or cysteine
DIVMTQSPLSLPVTPGEPASISXRSSQSLLHSNGFNYLGWYLQKPGQSPQLLIYLGSNRASGVPDRFSGSGSGTDFTLKISRVEAEDVGVYYXMQALQTPYTFGQGTKLEIKR

SEQ ID NO: 255 - protein, 107 aa, Artificial Sequence
  Synthesized sequence with two or more selenocysteine residues substituted for two or more cysteine residues
  VARIANT (1)...(107): Xaa = selenocysteine or cysteine
DIRMTQSPSSLSASVGDRVTITXRASQSISSYLNWYQQKPGKAPKLLIYAASSLQSGVPSRFSGSGSGTDFTLTISSLQPEDFATYYXQQSYSTPLTFGGGTKVEIK

SEQ ID NO: 256 - protein, 108 aa, Artificial Sequence
  Synthesized sequence with two or more selenocysteine residues substituted for two or more cysteine residues
  VARIANT (1)...(108): Xaa = selenocysteine or cysteine
DIVMTQSQKFMSTTVGDRVSLTXKASQSVGTAVAWYQEKTGQSPKLLIYSASNRYTGVPDRFTGSGSGTDFILTIRNMQSVDLADYFXQQYFTYPYTFGGGTKLEIQR

SEQ ID NO: 257 - protein, 108 aa, Artificial Sequence
  Synthesized sequence with two or more selenocysteine residues substituted for two or more cysteine residues
  VARIANT (1)...(108): Xaa = selenocysteine or cysteine
DIVLTQSPATLSVTPGDSVSLSXRASQSIRSNLHWYQQKSHESPRLLIKYASQSISGIPSRFSGSGSGTDFILSINSVATEDFGVYFXQQSNSWPLTFGAGTKLELKR

SEQ ID NO: 258 - protein, 108 aa, Artificial Sequence
  Synthesized sequence with two or more selenocysteine residues substituted for two or more cysteine residues
  VARIANT (1)...(108): Xaa = selenocysteine or cysteine
QDIQMTQSPSSLSASVGDRVTITXRASQGVNNFLAWYQQKPGKAPRLLIYAASTLQSGVPSRFSGSGSGTDFTLSISNLQPEDFATYYXQQSYSTPRGFGQGTKVEIK

SEQ ID NO: 259 - protein, 107 aa, Artificial Sequence
  Synthesized sequence with two or more selenocysteine residues substituted for two or more cysteine residues
  VARIANT (1)...(107): Xaa = selenocysteine or cysteine
DIQMTQSPSSLSASVGDRVTITXRASENIYNNLAWYQQKPGKAPKLLVYAATNLADGVPSRFSGSGSGTQYTLTISSLQPEDFATYYXDHLWTSPYTFGGGTKVEIK

SEQ ID NO: 260 - protein, 105 aa, Artificial Sequence
  Synthesized sequence with two or more selenocysteine residues substituted for two or more cysteine residues
  VARIANT (1)...(105): Xaa = selenocysteine or cysteine
ILMTQSPAIMSASPGEKVTMTXSASSSVSYMHWYQQKSGTSPKRWIYDTSKLASGVPARFSGSGSGTSYSLTISSMEAEDAATYYXQQWSSNPLTFGAGTKLEIK

SEQ ID NO: 261 - protein, 107 aa, Artificial Sequence
  Synthesized sequence with two or more selenocysteine residues substituted for two or more cysteine residues
  VARIANT (1)...(107): Xaa = selenocysteine or cysteine
SYELTQPPSVSVSPGQTARITXSGDALPKQYASWYQQKPGQAPLLVIYRDSERPSGLPERFSGSSSGTTVTLTISGVQAEDEADYYXQSADSGGSYVFGTGTKVTVL

SEQ ID NO: 262 - protein, 107 aa, Artificial Sequence
  Synthesized sequence with two or more selenocysteine residues substituted for two or more cysteine residues
  VARIANT (1)...(107): Xaa = selenocysteine or cysteine
EIVLTQSPATLSLSPGERATLSXSASSSISYMHWFQQRPGQSPRRWIYDTSKLASGVPARFSGSGSGTDYTLTISSLEPEDFATYYXHQRTSYPLTFGQGTKLEIKR

SEQ ID NO: 263 - protein, 112 aa, Artificial Sequence
  Synthesized sequence with two or more selenocysteine residues substituted for two or more cysteine residues
  VARIANT (1)...(112): Xaa = selenocysteine or cysteine
QSVLTQAPSVSGAPGQRVTISXTGRSSNIGAGYDVHWYQQFPGTAPKLLIYGNSNRPSGVPDRFSGSKSGTSASLAITGLQAEDEADYYXQSYDSSLSGSVFGGGTKLTVLG

SEQ ID NO: 264 - protein, 113 aa, Artificial Sequence
  Synthesized sequence with two or more selenocysteine residues substituted for two or more cysteine residues
  VARIANT (1)...(113): Xaa = selenocysteine or cysteine
DIALTQPASVSGSPGQSITISXTGTSSDVGGFNYVSWYQQHPGKAPKLMIHDGSNRPSGVSNRFSGSKSGNTASLTISGLQAEDEADYYXQSWDVSPITAVFGGGTKLTVLGQ

SEQ ID NO: 265 - protein, 112 aa, Artificial Sequence
  Synthesized sequence with two or more selenocysteine residues substituted for two or more cysteine residues
  VARIANT (1)...(112): Xaa = selenocysteine or cysteine
QSVLTQPPSASGTPGQRVTISXTGSSSNIGAGYDVHWYQQLPGTAPKLLIYDNNNRPSGVPDRFSGSKSGTSASLAISGLRSEDEADYYXQSYDSSLSAWLFGGGTKLTVLG

SEQ ID NO: 266 - protein, 107 aa, Artificial Sequence
  Synthesized sequence with two or more selenocysteine residues substituted for two or more cysteine residues
  VARIANT (1)...(107): Xaa = selenocysteine or cysteine
EIVLTQSPATLSLSPGERATLSXRASQSISSYLAWYQQKPGQAPRLLIYDASNRATGIPARFSGSGSGTDFTLTISSLEPEDFAVYYXQQRSNWPLTFGQGTNLEIK

SEQ ID NO: 267 - protein, 108 aa, Artificial Sequence
  Synthesized sequence with two or more selenocysteine residues substituted for two or more cysteine residues
  VARIANT (1)...(108): Xaa = selenocysteine or cysteine
EIVLTQSPGTLSLSPGERATLSXRASQSVSSSYLAWYQQKPGQAPRLLIYGASSRATGIPDRFSGSGSGTDFTLTISRLEPEDFAVYYXQQYGSSQYTFGQGTKLEIK

SEQ ID NO: 268 - protein, 107 aa, Artificial Sequence
  Synthesized sequence with two or more selenocysteine residues substituted for two or more cysteine residues
  VARIANT (1)...(107): Xaa = selenocysteine or cysteine
DIQMTQSPSSLSASVGDRVTITXRASQGISSWLAWYQQKPEKAPKSLIYAASSLQSGVPSRFSGSGSGTDFTLTISSLQPEDFATYYXQQYNSYPPTFGGGTKVEIK

SEQ ID NO: 269 - protein, 112 aa, Artificial Sequence
  Synthesized sequence with two or more selenocysteine residues substituted for two or more cysteine residues
  VARIANT (1)...(112): Xaa = selenocysteine or cysteine
DVVMTQSPLSLPVTLGQPASISXRSSQNIVHSNGNTYLEWYLQRPGQSPRLLIYKVSNRFSGVPDRFSGSGSGTDFTLKISRVEAEDVGVYYXFQGSHVPWTFGQGTKVEIK

SEQ ID NO: 270 - protein, 112 aa, Artificial Sequence
  Synthesized sequence with two or more selenocysteine residues substituted for two or more cysteine residues
  VARIANT (1)...(112): Xaa = selenocysteine or cysteine
QSVLTQPPSASGTPGQRVTISXSGSSSNIGSNDVYWYQQLPGTAPKLLIYDNNKRPSGVPDRFSGSKSGTSASLAISGLRSEDEADYYXQSYDSSLSGSWVFGGGTKLTVLG

SEQ ID NO: 271 - protein, 109 aa, Artificial Sequence
  Synthesized sequence with two or more selenocysteine residues substituted for two or more cysteine residues
  VARIANT (1)...(109): Xaa = selenocysteine or cysteine
QIVLTQSPAIMSASPGEKVTLTXSAGSSVDSSYLYWYQQKPGSSPKLWIYSTSNLASGVPARFSGSGSGTSYSLTISSMEAEDAASYFXHQWSSYPFTFGSGTKLEIKR

SEQ ID NO: 272 - protein, 110 aa, Artificial Sequence
  Synthesized sequence with two or more selenocysteine residues substituted for two or more cysteine residues
  VARIANT (1)...(110): Xaa = selenocysteine or cysteine
DIQMTQSPSSLSASVGDRVTITXQASQDISNYLNWYQQKPGKAPKLLIYDASNLETGVPSRFSGSGSGTDFTFTISSLQPEDIATYYXQQYDNLPPELTFGGGTKVEIKR

SEQ ID NO: 273 - protein, 108 aa, Artificial Sequence
  Synthesized sequence with two or more selenocysteine residues substituted for two or more cysteine residues
  VARIANT (1)...(108): Xaa = selenocysteine or cysteine
AIQLTQSPSSLSASVGDRVTITXRASQGISSALAWYQQKPGKAPKLLIYDASSLESGVPSRFSGSGSGTDFTLTISSLQPEDFATYYXQQFNSYLITFGQGTRLEIKR

SEQ ID NO: 274 - protein, 111 aa, Artificial Sequence
  Synthesized sequence with two or more selenocysteine residues substituted for two or more cysteine residues
  VARIANT (1)...(111): Xaa = selenocysteine or cysteine
DIVLTQSPASLAVSLGQRATISYRASKSVSTSGYSYMHWNQQKPGQPPRLLIYLVSNLESEVPARFSGSGSGDTFTLNIHPVEEEDAATYYXQHIRELTRSEGGTKLEIKR

SEQ ID NO: 275 - protein, 113 aa, Artificial Sequence
  Synthesized sequence with two or more selenocysteine residues substituted for two or more cysteine residues
  VARIANT (1)...(113): Xaa = selenocysteine or cysteine
DVMMTQTPLSLPVSLGDQASISXRSSQSLVHSNGNTYLEWYMQKPGQSPMLLIYKVSNRFSGVPDRFSGSGSGTDFTLKISSVEAEDLGVFYXFQGSRVPLTFGAGTKLELKR

SEQ ID NO: 276 - protein, 111 aa, Artificial Sequence
  Synthesized sequence with two or more selenocysteine residues substituted for two or more cysteine residues
  VARIANT (1)...(111): Xaa = selenocysteine or cysteine
NFMLTQPHSVSESPGKTVTISXTRSSGSLANYYVQWYQQRPGSSPTIVIFANNQRPSGVPDRFSGSIDSSSNSASLTISGLKTEDEADYYXQTYDPYSVVFGGGTKLTVLG

SEQ ID NO: 277 - protein, 108 aa, Artificial Sequence
  Synthesized sequence with two or more selenocysteine residues substituted for two or more cysteine residues
  VARIANT (1)...(108): Xaa = selenocysteine or cysteine
DIQMTQSPASLSASVGETVTITXRTSGNIHNYLTWYQQNLGKSPQLLVYNAKTLADGVPSRFSGSGSGTQFSLTINSLQPEDFGNYYXQHFWSLPFTFGSGTKLEIKR

SEQ ID NO: 278 - protein, 114 aa, Artificial Sequence
  Synthesized sequence with two or more selenocysteine residues substituted for two or more cysteine residues
  VARIANT (1)...(114): Xaa = selenocysteine or cysteine
DIMMTQSPSTLSASVGDRVTITXKSSQSLLYSNNQKNYLAWYQQKPGQAPKLLISWASTRESGVPSRFIGSGSGTEFTLTISSLQPDDVATYYXQQYYDYPWTFGQGTKVEIKR

SEQ ID NO: 279 - protein, 107 aa, Artificial Sequence
  Synthesized sequence with two or more selenocysteine residues substituted for two or more cysteine residues
  VARIANT (1)...(107): Xaa = selenocysteine or cysteine
DIQMTQSPSSLSASVGDRVTITXLASEDISNYLAWYQQKPGKAPKLLIYHTSRLQDGVPSRFSGSGSGTDFTLTISSLQPEDFATYYXQQGYRFPLTFGGGTKVEIK

SEQ ID NO: 280 - protein, 112 aa, Artificial Sequence
  Synthesized sequence with two or more selenocysteine residues substituted for two or more cysteine residues
  VARIANT (1)...(112): Xaa = selenocysteine or cysteine
DIVLTQSPASLAVSLGQRATISXRASKSVSSSAYSFFHWYQQKPGQPPKLLIYLASNLQSGVPARFSGSGSGTDFTLNIHPVEAEDAATYYXQHSGELPFTFGSGTKLEIKR

SEQ ID NO: 281 - protein, 110 aa, Artificial Sequence
  Synthesized sequence with two or more selenocysteine residues substituted for two or more cysteine residues
  VARIANT (1)...(110): Xaa = selenocysteine or cysteine
QSELTQPPSASGTPGQRVTISXSGSSSNIGRNYVYWYQQVPGTAPKLLIYSNNQRPSGVPDRFSGSKSGTSASLVISGLRSEDEADYYXAAWDASLRGVFGGGTKLTVLG

SEQ ID NO: 282 - protein, 108 aa, Artificial Sequence
  Synthesized sequence with two or more selenocysteine residues substituted for two or more cysteine residues
  VARIANT (1)...(108): Xaa = selenocysteine or cysteine
DIVMTQSPSSVSASVGDRVTIFXRASQDIRNWVAWYQQKPGEAPKLLIYDGSSLQSGVPSRFSGSGSGTEFTLTISSLQPEDFATYYXQQSDSTPITFGQGTRLEIKR

SEQ ID NO: 283 - protein, 107 aa, Artificial Sequence
  Synthesized sequence with two or more selenocysteine residues substituted for two or more cysteine residues
  VARIANT (1)...(107): Xaa = selenocysteine or cysteine
EIVMTQSPATLSVSPGERATFSXRASQNISTTLAWYQQKPGQAPRLLIYDTSTRATGIPARFSGSGSGTEFTLTISSLQSEDLAVYYXQQSNSWPLTFGGGTKVEIK

SEQ ID NO: 284 - protein, 108 aa, Artificial Sequence
  Synthesized sequence with two or more selenocysteine residues substituted for two or more cysteine residues
  VARIANT (1)...(108): Xaa = selenocysteine or cysteine
SIVMTQTPKFLLVSAGDRVTITXKASQSVSNDVAWYQQKPGQSPKLLIYYASNRYTGVPDRFTGSGYGTDFTFTISTVQAEDLAVYFXQQDYSSPYTFGGGTKLEIKR

SEQ ID NO: 285 - protein, 107 aa, Artificial Sequence
  Synthesized sequence with two or more selenocysteine residues substituted for two or more cysteine residues
  VARIANT (1)...(107): Xaa = selenocysteine or cysteine
DIQMTQTTSSLSASLGDRVTISXRTSQDIGNYLNWYQQKPDGTVKLLIYYTSRLHSGVPSRFSGSGSGTDYSLTISNLEQEDIATYFXQQGKSLPRTFGGGTKLEIK

SEQ ID NO: 286 - protein, 100 aa, Artificial Sequence
  Synthesized sequence with two or more selenocysteine residues substituted for two or more cysteine residues
  VARIANT (1)...(100): Xaa = selenocysteine or cysteine
DIVMTQTPLSLPVSLGDQASISXRSSQSLVHSNGKTYLHWYLQKPGQSPKLLIYKVSNRFSGVPDRFSGSGSGTDFTLKISRVEAEDLGVYFXSQSTHVP

SEQ ID NO: 287 - protein, 112 aa, Artificial Sequence
  Synthesized sequence with two or more selenocysteine residues substituted for two or more cysteine residues
  VARIANT (1)...(112): Xaa = selenocysteine or cysteine
DFVMTQTPLTLSVTIGQPASISXKSSQSLLDSDGKTYLNWLLQRPGQSPKHLIYLVSKLDSGVPDRFTGSGSGTDFTLRISRVEAEDLGVYYXWQSTHFPWTFGGGTKLEIK

SEQ ID NO: 288 - protein, 111 aa, Artificial Sequence
  Synthesized sequence with two or more selenocysteine residues substituted for two or more cysteine residues
  VARIANT (1)...(111): Xaa = selenocysteine or cysteine
DIVLTQPPSVSGAPGQRVTISXSGSSSNIGSNYVSWYQQLPGTAPKLLIYDNNQRPSGVPDRFSGSKSGTSASLAITGLQSEDEADYYXQVRDNNENEWVFGGGTKLTVLG

SEQ ID NO: 289 - protein, 108 aa, Artificial Sequence
  Synthesized sequence with two or more selenocysteine residues substituted for two or more cysteine residues
  VARIANT (1)...(108): Xaa = selenocysteine or cysteine
ELVMTQSPSSLSASVGDRVNIAXRASQGISSNLHWYQQKPGKAPRLLIKYTSRLHSGVPSRFSGSGSGTDFTLTISSLQPEDFAIYYXQQNNNWPTTFGGGTKVEIKR

SEQ ID NO: 290 - protein, 106 aa, Artificial Sequence
  Synthesized sequence with two or more selenocysteine residues substituted for two or more cysteine residues
  VARIANT (1)...(106): Xaa = selenocysteine or cysteine
DIQMTQSPSSLSASVGDRVTITXRASENIYSNLAWYQQKPGKAPKLLIYAATYLADGVPSRFSGSGSGTDYTFTISSLQPEDIATYYXQHFWGTPPFGQGTKVEIK

SEQ ID NO: 291 - protein, 108 aa, Artificial Sequence
  Synthesized sequence with two or more selenocysteine residues substituted for two or more cysteine residues
  VARIANT (1)...(108): Xaa = selenocysteine or cysteine
DIQMTQSPSSLSASVGDRVTITXKASQDVSTAVAWYQQKPGKAPKLLIYSASYRYTGVPSRFSGSGSGTDFTLTISSLQPEDFATYYXQQHFSSPRTFGQGTKVEIKR

SEQ ID NO: 292 - protein, 109 aa, Artificial Sequence
  Synthesized sequence with two or more selenocysteine residues substituted for two or more cysteine residues
  VARIANT (1)...(109): Xaa = selenocysteine or cysteine
TQPPSASGTPGQRVTISXSGSTSNLKRNYVYWYQQLPGTAPKLLIYRDRRRPSGVPDRFSGSKSGTSASLAISGLRSEDEADYYXAWYDRELSEWVFGGGTKLTVLQPK

SEQ ID NO: 293 - protein, 107 aa, Artificial Sequence
  Synthesized sequence with two or more selenocysteine residues substituted for two or more cysteine residues
  VARIANT (1)...(107): Xaa = selenocysteine or cysteine
DIVLTQSPSSLSASVGDRVTLTXRASSSVNYMHWYQQRPGKPPKALIYATSNLASGVPSRFSGSGSGTEFTLTISSLQPEDVAVYYXQQWRTNPPTFGQGTKLEVKR

SEQ ID NO: 294 - protein, 108 aa, Artificial Sequence
  Synthesized sequence with two or more selenocysteine residues substituted for two or more cysteine residues
  VARIANT (1)...(108): Xaa = selenocysteine or cysteine
DIQMTQSPSSLSASVGDRVTITXRASQSISNYLNWYQQKPGKAPKLLIYTASTLQSGVPSRFSGSASGTDFTLTINSLQPEDFATYSXQQSYNSPWTFGQGTKVEIKR

SEQ ID NO: 295 - protein, 109 aa, Artificial Sequence
  Synthesized sequence with two or more selenocysteine residues substituted for two or more cysteine residues
  VARIANT (1)...(109): Xaa = selenocysteine or cysteine
SSELTQDPAVSVALGQTVRITXQGDSLRKFFASWYQQKPGQAPVLVIYGKNSRPSGIPDRFSGSNSRNTASLTITGAQAEDEGDYYXNSRDSRDNHQVFGAGTKVTVLS

SEQ ID NO: 296 - protein, 108 aa, Artificial Sequence
  Synthesized sequence with two or more selenocysteine residues substituted for two or more cysteine residues
  VARIANT (1)...(108): Xaa = selenocysteine or cysteine
DIQMTQSPSSLSASVGDRVTITXRASQWIGPELKWYQQKPGKAPKLLIYHGSILQSGVPSRFSGSGSGTDFTLTISSLQPEDFATYYXQQYMYYPHTFGQGTKVEIKR

SEQ ID NO: 297 - protein, 113 aa, Artificial Sequence
  Synthesized sequence with two or more selenocysteine residues substituted for two or more cysteine residues
  VARIANT (1)...(113): Xaa = selenocysteine or cysteine
EIVLTQSPASLAVSPGQRATITXRASESVSFLGINLIHWYQQKPGQPPKLLIYQASNKDTGVPARFSGSGSGTDFTLTINPVEANDTANYYXLQSKNFPPYTFGQGTKLEIKR

SEQ ID NO: 298 - protein, 107 aa, Artificial Sequence
  Synthesized sequence with two or more selenocysteine residues substituted for two or more cysteine residues
  VARIANT (1)...(107): Xaa = selenocysteine or cysteine
DIQMTQSPASLSASVGETVTITXRTSENIYIYLAWYQQKQGKSPQLLVYNAKTLAEGVPSRFSGSGSGTQFSLKINGLQPEDFGGYYXQQHYGTPYTFGGGTKLEKK

SEQ ID NO: 299 - protein, 113 aa, Artificial Sequence
  Synthesized sequence with two or more selenocysteine residues substituted for two or more cysteine residues
  VARIANT (1)...(113): Xaa = selenocysteine or cysteine
DVGMTQTPLTLSVTIGQPASFSXKSSQSLLYSNGKTYLNWLLQRPGQSPKRLIHLVSKLDSGVPDRFTGSGSGTDFTLKIGRVEAEDLGVYYXVQGTHFPYTFGGGTKLEIKR

SEQ ID NO: 300 - protein, 108 aa, Artificial Sequence
  Synthesized sequence with two or more selenocysteine residues substituted for two or more cysteine residues
  VARIANT (1)...(108): Xaa = selenocysteine or cysteine
DIVMTQSPSSLSASVGDRVTLTXTASQSVSNDVVWYQQRPGKAPKLLIYSAFNRYTGVPSRFSGRGYGTDFTLTISSLQPEDVAVYYXQQDYNSPRTFGQGTKLEVKR

SEQ ID NO: 301 - protein, 106 aa, Artificial Sequence
  Synthesized sequence with two or more selenocysteine residues substituted for two or more cysteine residues
  VARIANT (1)...(106): Xaa = selenocysteine or cysteine
QIVLTQSPAIMSASPGEKVTMTXSASSSVSYMHWYHQRSGTSPKRWIYDTSKLASGVPARFSGSGSGTSYSLTISSMEAEDAATYYXHQLSSDPFTFGSGTKLEIK

SEQ ID NO: 302 - protein, 109 aa, Artificial Sequence
  Synthesized sequence with two or more selenocysteine residues substituted for two or more cysteine residues
  VARIANT (1)...(109): Xaa = selenocysteine or cysteine
YDMTQTPASVSEPVGGTVTIKXQASENIYSSLAWYQQKPGQPPKLLIYSASTLASGVSSRFKGSGSGTEFTLTISDLEXADAATYYXQQGFGTSNVENPFGGGTEVVVK

SEQ ID NO: 303 - protein, 107 aa, Artificial Sequence
  Synthesized sequence with two or more selenocysteine residues substituted for two or more cysteine residues
  VARIANT (1)...(107): Xaa = selenocysteine or cysteine
DIVMTQSHKFMSTSVGDRVSITXKASQDVSTGVVWYQQKEGQSPKLLIYSASYRYTGVPNRFTGSGSGTDFTFTISGVQAEDLAVYYXQQHYSSPTFGGGTKLEIKR

SEQ ID NO: 304 - protein, 120 aa, Artificial Sequence
  Synthesized sequence with two or more selenocysteine residues substituted for two or more cysteine residues
  VARIANT (1)...(120): Xaa = selenocysteine or cysteine
WNDVLXSLVDLXRAXSSQASVSTQTDYLTTSPGGTVILTXRXATGAVTTSNYANWVQEKPDHLFTGLIGGTSNRAPGVPVRFSGSLIGDKAALTITGAQTEDDAMYFSSLWYYGGHGVFG

SEQ ID NO: 305 - protein, 107 aa, Artificial Sequence
  Synthesized sequence with two or more selenocysteine residues substituted for two or more cysteine residues
  VARIANT (1)...(107): Xaa = selenocysteine or cysteine
SIVMTQTPKFLLVSAGDRITIAXRASQSVSNDVAWYQQKPGQSPKLLINYTSNRYTGVPDRFTGSGYGTDFTFTISTVQAEDLAVYFXQQAYSSPWTFGGGTKLEIK

SEQ ID NO: 306 - protein, 107 aa, Artificial Sequence
  Synthesized sequence with two or more selenocysteine residues substituted for two or more cysteine residues
  VARIANT (1)...(107): Xaa = selenocysteine or cysteine
DIVMTQSPATLSVTPGDRVSLSXRASQSISDYLHWYQQKSHESPRLLIRYASQSISGIPSRFSGSGSGSDFTLSINNVEPEDVGVYYXQNGHNFPLTFGAGTKLELK

SEQ ID NO: 307 - protein, 107 aa, Artificial Sequence
  Synthesized sequence with two or more selenocysteine residues substituted for two or more cysteine residues
  VARIANT (1)...(107): Xaa = selenocysteine or cysteine
DVQITQSPSYLAASPGETITINXRASKSISKYLAWYQEKPGKTNKLLIYSGSTLQSGIPSRFSGSGSGTDFTLTISSLEPEDFAMYYXQQHHEYPYTFGGGTKLEIK

SEQ ID NO: 308 - protein, 108 aa, Artificial Sequence
  Synthesized sequence with two or more selenocysteine residues substituted for two or more cysteine residues
  VARIANT (1)...(108): Xaa = selenocysteine or cysteine
DIQLTQSPSSLSASVGDRVTITXQASQDISNYLNWYQQKPGKAPKLLMYDASNLETGVPSRFSGSGSGTDFTFTISSLQPEDFATYYXQQSDNLPYTFGQGTKVDIKR

SEQ ID NO: 309 - protein, 97 aa, Artificial Sequence
  Synthesized sequence with two or more selenocysteine residues substituted for two or more cysteine residues
  VARIANT (1)...(97): Xaa = selenocysteine or cysteine
ASLAVSLGQRATISXRASESVDNYGISFMNWFQQKPGQPPKLLIYAASNQGSGVPARFSGSGSGTDFSLNIHPMEGDDSAMYFXQQSKEVPRTRSEG

SEQ ID NO: 310 - protein, 112 aa, Artificial Sequence
  Synthesized sequence with two or more selenocysteine residues substituted for two or more cysteine residues
  VARIANT (1)...(112): Xaa = selenocysteine or cysteine
DVVMTQSPLSLPVTLGEPASISXRSSQSLVHSNGNTYLHWYLQKPGQSPQLLIYKVSNRFSGVPDRFSGSGSGTDFTLKISRVEAEDVGVYFXSQSTLVPLTFGQGTKLEIK

SEQ ID NO: 311 - protein, 106 aa, Artificial Sequence
  Synthesized sequence with two or more selenocysteine residues substituted for two or more cysteine residues
  VARIANT (1)...(106): Xaa = selenocysteine or cysteine
DIELTQPPSVSVAPGQTARISXSGDSIGKKYAYWYQQKPGQAPVLVIYKKRPSGIPERFSGSNSGNTATLTISGTQAEDEADYYXSAWGDKGMVFGGGTKLTVLGQ

SEQ ID NO: 312 - protein, 112 aa, Artificial Sequence
  Synthesized sequence with two or more selenocysteine residues substituted for two or more cysteine residues
  VARIANT (1)...(112): Xaa = selenocysteine or cysteine
DVVLTQTPLSLPVSLGDQASISXRVSQSLLHSNGYTYLHWYLQKPGQSPKLLIYKVSNRFSGVPDRFSGSGSGTDFTLKISRVEAEDLGVYFXSQTRHVPYTFGGGTKLEIK

SEQ ID NO: 313 - protein, 108 aa, Artificial Sequence
  Synthesized sequence with two or more selenocysteine residues substituted for two or more cysteine residues
  VARIANT (1)...(108): Xaa = selenocysteine or cysteine
DIQMTQSPSSLSASVGDRVTITXRASQDVSTAVAWYQQKPGKAPKLLIYSASFLYSGVPSRFSGSGSGTDFTLTISSLQPEDFATYYXQQFPTYLPTFGQGTKVEIKR

SEQ ID NO: 314 - protein, 108 aa, Artificial Sequence
  Synthesized sequence with two or more selenocysteine residues substituted for two or more cysteine residues
  VARIANT (1)...(108): Xaa = selenocysteine or cysteine
DIQMTQSPSSLSASVGDRVTITXRASESISYSLSWYQQKPGKAPKLLIYNAVKLESGVPSRFSGSGSGTDFTLTISSLQPEDFATYYXKQYWNTPFTFGQGTKVEIKR

SEQ ID NO: 315 - protein, 108 aa, Artificial Sequence
  Synthesized sequence with two or more selenocysteine residues substituted for two or more cysteine residues
  VARIANT (1)...(108): Xaa = selenocysteine or cysteine
DIQMTQSPSSLSASVGDRVTITXRASQDVSTAVAWYQQKPGKAPKLLIYSASFLYSGVPSRFSGSGSGTDFTLTISSLQPEDFATYYXQQSYTTPPTFGQGTKVEIKR

SEQ ID NO: 316 - protein, 111 aa, Artificial Sequence
  Synthesized sequence with two or more selenocysteine residues substituted for two or more cysteine residues
  VARIANT (1)...(111): Xaa = selenocysteine or cysteine
QPVLTQSPSASASLGNSVKITXTLSSQHSTYTIGWYQQHPDKAPKYVMYVNSDGSHSKGDGIPDRFSGSSSGAHRYLSISNIQPEDEADYFXGSSDSSGYVFGSGTQLTVL

SEQ ID NO: 317 - protein, 107 aa, Artificial Sequence
  Synthesized sequence with two or more selenocysteine residues substituted for two or more cysteine residues
  VARIANT (1)...(107): Xaa = selenocysteine or cysteine
DIQMTQTTSSLSASLGDRVTISXSASQGISNYLNWYQQKPDGNVKLLIYYTSSLHSGVPSRFSGSGSGTDYSLTISNLEPEDIATYYXQQYSKLPYTFGGGTKLEIK

SEQ ID NO: 318 - protein, 114 aa, Artificial Sequence
  Synthesized sequence with two or more selenocysteine residues substituted for two or more cysteine residues
  VARIANT (1)...(114): Xaa = selenocysteine or cysteine
DIQMTQSPSSLSASVGDRVTITXRSSQSLVHGIGNTYLHWYQQKPGKAPKLLIYYKVSNRFSGVPSRFSGSGSGTDFTLTISSLQPEDFATYYXSQSTHVPLTFGQGTKVEIKR

SEQ ID NO: 319 - protein, 114 aa, Artificial Sequence
  Synthesized sequence with two or more selenocysteine residues substituted for two or more cysteine residues
  VARIANT (1)...(114): Xaa = selenocysteine or cysteine
EIVLTQSPAITAASLGQKVTITXSASSSVSYMHWYQQKSGTSPKPWIYEISKLASGVPARFSGSGSGTSYSLTISSMEAEDAAIYYXQQWNYPLITFGSGTKLEIKRADAAPTV

SEQ ID NO: 320 - protein, 108 aa, Artificial Sequence
  Synthesized sequence with two or more selenocysteine residues substituted for two or more cysteine residues
  VARIANT (1)...(108): Xaa = selenocysteine or cysteine
ETVLTQSPGTLSLSPGERATLSXRASQSLGSSYLAWYQQKPGQAPRLLIYGASSRAPGIPDRFSGSGSGTDFTLTISRLEPEDFAVYYXQQYADSPITFGQGTRLEIK

SEQ ID NO: 321 - protein, 111 aa, Artificial Sequence
  Synthesized sequence with two or more selenocysteine residues substituted for two or more cysteine residues
  VARIANT (1)...(111): Xaa = selenocysteine or cysteine
DWMTQTPLNLSVTIGQPASISXKSSQSLLDRDGKTYLNWLFQRPGQSPKRLIYLVSKLDSGVPDRFTGSGSGTDFTLKISRVEAEDLGVYYXWQGTHFPRTFGGGTKLEIK

SEQ ID NO: 322 - protein, 108 aa, Artificial Sequence
  Synthesized sequence with two or more selenocysteine residues substituted for two or more cysteine residues
  VARIANT (1)...(108): Xaa = selenocysteine or cysteine
EIVLTQSPATLSLSPGERATLSXRASKSISKYLAWYQQKPGQAPRLLIYSGSTLQSGIPARFSGSGSGTDFTLTISSLEPEDFAVYYXQQHNEYPYTFGQGTKLEIKR

SEQ ID NO: 323 - protein, 110 aa, Artificial Sequence
  Synthesized sequence with two or more selenocysteine residues substituted for two or more cysteine residues
  VARIANT (1)...(110): Xaa = selenocysteine or cysteine
QSVLTQPPSASGTPGQRATISXTGSSSNIGSNSVSWYQQLPGTAPKLLIYANSNRPSGVPDRFSGSKSGTSASLAISGLRSEDEADYYXGTWDASLSAYVFGGGTKLTVL

SEQ ID NO: 324 - protein, 108 aa, Artificial Sequence
  Synthesized sequence with two or more selenocysteine residues substituted for two or more cysteine residues
  VARIANT (1)...(108): Xaa = selenocysteine or cysteine
DIVLTQSPASLAVSLGQRATISYRASKSVSTSGYSYMHWNQQKPGQPPRLLIYLVSNLESGVPARFSGSGSGTDFTLNIHPVEEEDAATYYXQHIRELTRSEGGPSWK

SEQ ID NO: 325 - protein, 105 aa, Artificial Sequence
  Synthesized sequence with two or more selenocysteine residues substituted for two or more cysteine residues
  VARIANT (1)...(105): Xaa = selenocysteine or cysteine
SIVMTQTPKFLLVSAGDRVTITXKASQSVSNDVTWYQQKAGQSPKLLIYSASNRYSGVPDRFTGSGYGTAFTFTISTVQAEDLAVYFXQQDYSSFGGGTKLEIKR

SEQ ID NO: 326 - protein, 112 aa, Artificial Sequence
  Synthesized sequence with two or more selenocysteine residues substituted for two or more cysteine residues
  VARIANT (1)...(112): Xaa = selenocysteine or cysteine
DIVMTQSPLSLPVTPGEPASISXRSSQSIVYSNGNTYLGWYLQKPGQSPQLLIYKVSNRFSGVPDRFSGSGSGTDFTLKISRVEAEDVGVYYXFQGSHVPYTFGQGTKLEIK

SEQ ID NO: 327 - protein, 107 aa, Artificial Sequence
  Synthesized sequence with two or more selenocysteine residues substituted for two or more cysteine residues
  VARIANT (1)...(107): Xaa = selenocysteine or cysteine
EIVLTQSPGTLSLSPGERATLSXRASQSISSSYLAWYQQKPGQAPRLLIYGPSSRATGIPDRFSGSGSGTDFTLTISRLEPEDFAVYYXQQYAGSLTFGPGTKVDIK

SEQ ID NO: 328 - protein, 107 aa, Artificial Sequence
  Synthesized sequence with two or more selenocysteine residues substituted for two or more cysteine residues
  VARIANT (1)...(107): Xaa = selenocysteine or cysteine
EIVLTQSPATLSLSPGERATLSXRASQSVGRYLAWYQQKPGQAPRILIYGASNRATGIPARFSGSGSGTDFTLTISSLEPEDFAVYYXQQRSNWPLTFGGGTKVEIK

SEQ ID NO: 329 - protein, 113 aa, Artificial Sequence
  Synthesized sequence with two or more selenocysteine residues substituted for two or more cysteine residues
  VARIANT (1)...(113): Xaa = selenocysteine or cysteine
EIVLTQSPGSLAVSPGERVTMSXKSSQSVFFSSSQKNYLAWYQQIPGQSPRLLIYWASTRESGVPDRFTGSGSGTDFTLTISSVQPEDLAIYYXHQYLSSRTFGQGTKLEIKR

SEQ ID NO: 330 - protein, 108 aa, Artificial Sequence
  Synthesized sequence with two or more selenocysteine residues substituted for two or more cysteine residues
  VARIANT (1)...(108): Xaa = selenocysteine or cysteine
DIQLTQSPSSLSASVGDRVTITXRASENIYSNLAWYRQKPGKAPKLLVFAASNLADGVPSRFSGSGSGTDYTFTISSLQPEDIATYYXQHFWTTPWAFGGGTKLQIKR

SEQ ID NO: 331 - protein, 108 aa, Artificial Sequence
  Synthesized sequence with two or more selenocysteine residues substituted for two or more cysteine residues
  VARIANT (1)...(108): Xaa = selenocysteine or cysteine
DIQMTQSPSSLSASVGDRVTITXKTNENIYSNLAWYQQKDGKSPQLLIYAATHLVEGVPSRFSGSGSGTQYSLTISSLQPEDFGNYYXQHFWGTPXTFGGGTKLEIKR

SEQ ID NO: 332 - protein, 107 aa, Artificial Sequence
  Synthesized sequence with two or more selenocysteine residues substituted for two or more cysteine residues
  VARIANT (1)...(107): Xaa = selenocysteine or cysteine
DIQMTQSSSSFSVSLGDRVTITXKASEDIYNRLAWYQQKPGNAPRLLISGATSLETGVPSRFSGSGSGKDYTLSITSLQTEDVASYYXQQYWSTPFTFGSGTKLEIK

SEQ ID NO: 333 - protein, 113 aa, Artificial Sequence
  Synthesized sequence with two or more selenocysteine residues substituted for two or more cysteine residues
  VARIANT (1)...(113): Xaa = selenocysteine or cysteine
DIQMTQSPSSLSASVGDRVTITXRSSQNLVHSNGNTYLHWYQQKPGKAPKLLIYKVSNRFSGVPDRFSGSGSGTEFTLTISSLQPEDFATYYXSQSTHVPLTFGQGTKVEIKR

SEQ ID NO: 334 - protein, 112 aa, Artificial Sequence
  Synthesized sequence with two or more selenocysteine residues substituted for two or more cysteine residues
  VARIANT (1)...(112): Xaa = selenocysteine or cysteine
DIVLTQSPASLAVSLGQRATISXRASESVDSYGNSFMHWYQQKPGQPPKLLIYRASNLESGIPARFSGSGSRTDFTLTINPVEADDVATYYXQQSNEDPLTFGAGTKLELKR

SEQ ID NO: 335 - protein, 112 aa, Artificial Sequence
  Synthesized sequence with two or more selenocysteine residues substituted for two or more cysteine residues
  VARIANT (1)...(112): Xaa = selenocysteine or cysteine
DIQLTQSPSSLSASVGDRVTITXKASQSVDYDGDSYLNWYQQIPGKAPKLLIYDASNLVSGIPPRFSGSGSGTDYTFTISSLQPEDIATYHXQQSTEDPWTFGGGTKLQIKR

SEQ ID NO: 336 - protein, 108 aa, Artificial Sequence
  Synthesized sequence with two or more selenocysteine residues substituted for two or more cysteine residues
  VARIANT (1)...(108): Xaa = selenocysteine or cysteine
DIQLTQSPSSLSASVGDRVTITXKASQEVGTAVAWYQQKPGKAPKLLIYWASTRHTGVPSRFSGSGSGTDFTFTISSLQPEDIATYFXQQYSNYPLTFGQGTKVEIKR

SEQ ID NO: 337 - protein, 107 aa, Artificial Sequence
  Synthesized sequence with two or more selenocysteine residues substituted for two or more cysteine residues
  VARIANT (1)...(107): Xaa = selenocysteine or cysteine
DIQLTQSPALMSASPGEKVTMTXSASSSVTFMYWYQQKPRSSPKPWIYLTSNLASGVPARFSGSGSGTSYSLTISSMEAEDAATYYXQQWSSNPYTFGGGTKLELKR

SEQ ID NO: 338 - protein, 107 aa, Artificial Sequence
  Synthesized sequence with two or more selenocysteine residues substituted for two or more cysteine residues
  VARIANT (1)...(107): Xaa = selenocysteine or cysteine
QAVVTQESAFTTSPGGTVILTXRSSTGAVTTNNYANWVQEKPDHLFTGLIGGTSNRAPGVPVRFSGSLIGDKAALTITGAQTEDDGMYFXALWYTTHFVFGGGTKVT

SEQ ID NO: 339 - protein, 107 aa, Artificial Sequence
  Synthesized sequence with two or more selenocysteine residues substituted for two or more cysteine residues
  VARIANT (1)...(107): Xaa = selenocysteine or cysteine
ENVLTQSPAIMSASLGEKVTLSXRASSSVYYMFWYQQKSDASPKLWIYYTSNLAPGVPARFSGSGSGNSYSLTISSVEGEDAATYYXLQFSTSPWTFGGGTKLEIKR

SEQ ID NO: 340 - protein, 102 aa, Artificial Sequence
  Synthesized sequence with two or more selenocysteine residues substituted for two or more cysteine residues
  VARIANT (1)...(102): Xaa = selenocysteine or cysteine
DIVMTQSPDSLAVSLGERATINXKSSQSVLGSSSNINFLAWYQQKPGQPPKLLIYSASTRESGVPDRFSGSGSGTDFTLTISSLQAEDVAVYYXQQYFSTPI

SEQ ID NO: 341 - protein, 113 aa, Artificial Sequence
  Synthesized sequence with two or more selenocysteine residues substituted for two or more cysteine residues
  VARIANT (1)...(113): Xaa = selenocysteine or cysteine
DIVMTQSPDSLAVSLGERATINXKSSQSLLYSTNQKNSLAWYQQKPGQPPKLLIYWASTRESGVPDRFSGSGSGTDFTLTISSLQAEDVAVYYXQQYYRYPLTFGQGTKLEIK

SEQ ID NO: 342 - protein, 107 aa, Artificial Sequence
  Synthesized sequence with two or more selenocysteine residues substituted for two or more cysteine residues
  VARIANT (1)...(107): Xaa = selenocysteine or cysteine
DIQMTQSPSSLSASVGDRVTITXRASQTIYNYLNWYQQKPGKAPKLLIYAASSLQSGVPSRFGGRGYGTDFTLTINSLQPEDFATYFXQQSYTSPLTFGQGTKVDIK

SEQ ID NO: 343 - protein, 114 aa, Artificial Sequence
  Synthesized sequence with two or more selenocysteine residues substituted for two or more cysteine residues
  VARIANT (1)...(114): Xaa = selenocysteine or cysteine
SQSALTQPASVSGSPGQSITISXTGTISDIGTYDFVSWYQHKPGKAPKLLIFDVNNRPSGVSSRFSGSKSDNTASLSISGFQAEDEADYYXSSYTDNRGLVLFGGGTKLTVLRS

SEQ ID NO: 344 - protein, 112 aa, Artificial Sequence
  Synthesized sequence with two or more selenocysteine residues substituted for two or more cysteine residues
  VARIANT (1)...(112): Xaa = selenocysteine or cysteine
DVLMTQTPLSLPVSLGDQASISXRSSQSIVHSNGNTYLEWYLQKTGQSPELLIYKVSNRLSGVPDRFSGSGSGTDFTLKISRVEAEDLGVYYXFQGSHVPFTFGSGTKLEIK

SEQ ID NO: 345 - protein, 112 aa, Artificial Sequence
  Synthesized sequence with two or more selenocysteine residues substituted for two or more cysteine residues
  VARIANT (1)...(112): Xaa = selenocysteine or cysteine
DVVMTQSPLSLPVTLGQPASISXRSSQSLLISGGKTYLNWFQQRPGQSPARLIYLVSKLDQGVPDRFSGSGSGTDFTLKISRVEAEDVGVYYXWQGTYFPLTFGQGTKLEIK

SEQ ID NO: 346 - protein, 107 aa, Artificial Sequence
  Synthesized sequence with two or more selenocysteine residues substituted for two or more cysteine residues
  VARIANT (1)...(107): Xaa = selenocysteine or cysteine
AIQLTQSPSSLSASVGDRVTITXRASQGISNALAWYQQKPGKAPKLLIYDASSLESGVPSRFSGSGSGTDFTLTISSLQPEDFATYYXQQFNSYPWTFGQGTKVEIK

SEQ ID NO: 347 - protein, 110 aa, Artificial Sequence
  Synthesized sequence with two or more selenocysteine residues substituted for two or more cysteine residues
  VARIANT (1)...(110): Xaa = selenocysteine or cysteine
LETTLTQSPDTLSLSPGEGATLSXRASQSVSGSALAWYQQKPGQAPRLLIYDASSRATGVPDRFSGSGSGADFSLTISRLEPEDFAVYSXQQYGSSPLTFGPGTKVDVKR

SEQ ID NO: 348 - protein, 110 aa, Artificial Sequence
  Synthesized sequence with two or more selenocysteine residues substituted for two or more cysteine residues
  VARIANT (1)...(110): Xaa = selenocysteine or cysteine
QTVVTQEPSLTVSPGGTVTLTXRSSTGAVTTSNYANWVQQKPGQAFRGLIGDTNNRAPWTPARFSGSLLGGKAALTLSGVQPEDEAEYYXALWYSNHFIFGSGTKVTVLG

SEQ ID NO: 349 - protein, 107 aa, Artificial Sequence
  Synthesized sequence with two or more selenocysteine residues substituted for two or more cysteine residues
  VARIANT (1)...(107): Xaa = selenocysteine or cysteine
EIVLTQSPATLSLSPGERATLSXRASKSISKYLAWYQQKPGQAPRLLIYSGSTLQSGIPARFSGSGSGTDFTLTISSLEPEDFAVYYXQQHDYPYTFGQGTKLEIKR

SEQ ID NO: 350 - protein, 112 aa, Artificial Sequence
  Synthesized sequence with two or more selenocysteine residues substituted for two or more cysteine residues
  VARIANT (1)...(112): Xaa = selenocysteine or cysteine
DIVMTQSPLSLPVTPGEPASISXRSSQSIVHSNGNTYLEWYLQKPGQSPQLLISKVSNRFSGVPDRFSGSGSGTDFTLKISRVEAEDVGVYYXFQGSHVPFTFGQGTKLEIK

SEQ ID NO: 351 - protein, 109 aa, Artificial Sequence
  Synthesized sequence with two or more selenocysteine residues substituted for two or more cysteine residues
  VARIANT (1)...(109): Xaa = selenocysteine or cysteine
DIVLTQSPAFLSVTPGEKVTFTXQASQSIGTSIHWYQQKTDQAPKLLIKYASESISGIPSRFSGSGSGTDFTLTISSVEAEDAADYYXQQINSWPTTFGGGTKLEIKRT

SEQ ID NO: 352 - protein, 109 aa, Artificial Sequence
  Synthesized sequence with two or more selenocysteine residues substituted for two or more cysteine residues
  VARIANT (1)...(109): Xaa = selenocysteine or cysteine
EIVLTQSPGTLSLSPGERATLSXRASQSITGSYLAWYQQKPGQAPRLLITGASSWATGIPDRFSGSGSGTDFTLTISRLEPEDFAVYYXQQYSSSPITFGQGTRLEIKR

SEQ ID NO: 353 - protein, 108 aa, Artificial Sequence
  Synthesized sequence with two or more selenocysteine residues substituted for two or more cysteine residues
  VARIANT (1)...(108): Xaa = selenocysteine or cysteine
DIQMTQSPSSLSASVGDRVTITXRASQSISTWLAWYQQKPGKAPKLLIYKASNLHTGVPSRFSGSGSGTEFSLTISGLQPDDFATYYXQQYNSYSRTFGQGTKVEIKR

SEQ ID NO: 354 - protein, 107 aa, Artificial Sequence
  Synthesized sequence with two or more selenocysteine residues substituted for two or more cysteine residues
  VARIANT (1)...(107): Xaa = selenocysteine or cysteine
DIQMTQSPSSVSASVGDRVTITXRASQGISRLLAWYQQKPGKAPKLLIYVASSLQSGVPSRFSGSGSGTDFTLTISSLQPEDFATYYXQQANSFPWTFGQGTKVEIK

SEQ ID NO: 355 - protein, 111 aa, Artificial Sequence
  Synthesized sequence with two or more selenocysteine residues substituted for two or more cysteine residues
  VARIANT (1)...(111): Xaa = selenocysteine or cysteine
QSVLTQPPSVSAAPGQKVTISXSGGGSSIGNSYVSWYQQLPGTAPKLLIYDNNKRPSGIPDRFSGSKSGTSATLGITGLQTGDEADYYXGTWDTSPVWEWPFGTGTKLTVL

SEQ ID NO: 356 - protein, 108 aa, Artificial Sequence
  Synthesized sequence with two or more selenocysteine residues substituted for two or more cysteine residues
  VARIANT (1)...(108): Xaa = selenocysteine or cysteine
DIQMTQSPSSLSASVGDRVTITXKASQSVGSDVAWYQQKPGKAPKLLIYSTSYRYSGVPSRFSGSGSGTDFTLTISSLQPEDFATYYXQQYSSYPFTFGQGTKVEIKR

SEQ ID NO: 357 - protein, 107 aa, Artificial Sequence
  Synthesized sequence with two or more selenocysteine residues substituted for two or more cysteine residues
  VARIANT (1)...(107): Xaa = selenocysteine or cysteine
DIQMTQSPSSLSTSVGDRVTLTXKASQDVGTAVDWYQQKPGPSPKLLIYWASTRHTGIPSRFSGSGSGTDFTLTISSLQPEDFADYYXQQYNSYPLTFGPGTKVDIK

SEQ ID NO: 358 - protein, 111 aa, Artificial Sequence
  Synthesized sequence with two or more selenocysteine residues substituted for two or more cysteine residues
  VARIANT (1)...(111): Xaa = selenocysteine or cysteine
QSALTQPASVSGSPGQSITISXTGTSSDVGSYNVVSWYQQHPGKAPKLIIYEVSQRPSGVSNRFSGSKSGNTASLTISGLQTEDEADYYXXSYAGSSIFVIFGGGTKVTVL

SEQ ID NO: 359 - protein, 106 aa, Artificial Sequence
  Synthesized sequence with two or more selenocysteine residues substituted for two or more cysteine residues
  VARIANT (1)...(106): Xaa = selenocysteine or cysteine
SYELTQPPSVSVAPGQTARISXSGDSLGSYFVHWYQQKPGQAPVLVIYDDSNRPSGIPERFSGSNSGNTATLTISGTQAEDEADYYXSAFTHNSDVFGGGTKLTVL

SEQ ID NO: 360 - protein, 108 aa, Artificial Sequence
  Synthesized sequence with two or more selenocysteine residues substituted for two or more cysteine residues
  VARIANT (1)...(108): Xaa = selenocysteine or cysteine
DIELTQPPSVSVAPGQTARISXSGDNLRHYYWWYQQKPGQAPVLVIYGDSKRPSGIPERFSGSNSGNTATLTISGTQAEDEADYYXQTYTGGASLVFGGGTKLTVLGQ

SEQ ID NO: 361 - protein, 107 aa, Artificial Sequence; identical to SEQ ID NO: 268
  Synthesized sequence with two or more selenocysteine residues substituted for two or more cysteine residues
  VARIANT (1)...(107): Xaa = selenocysteine or cysteine

SEQ ID NO: 362 - protein, 109 aa, Artificial Sequence
  Synthesized sequence with two or more selenocysteine residues substituted for two or more cysteine residues
  VARIANT (1)...(109): Xaa = selenocysteine or cysteine
DIQMTQSPSSLSASVGDRVTITXSASSSINSNHLHWYQQKPGKAPKLLIYRTSILASGVPSRFSGSGSGTSFTLTISSLQPEDFATYYXQQGSNIPFTFGQGTKVEIKR

SEQ ID NO: 363 - protein, 108 aa, Artificial Sequence
  Synthesized sequence with two or more selenocysteine residues substituted for two or more cysteine residues
  VARIANT (1)...(108): Xaa = selenocysteine or cysteine
DIQMTQSPSSLSASLGERVSLTXRASQDIGSNLNWLQQEPDGTIKRLIYATSSLDSGVPKRFSGSRSGSDYSLTISSLESEDFVDYYXLQYASSPPTFGGGTKLEIKR

SEQ ID NO: 364 - protein, 109 aa, Artificial Sequence
  Synthesized sequence with two or more selenocysteine residues substituted for two or more cysteine residues
  VARIANT (1)...(109): Xaa = selenocysteine or cysteine
SSELTQDPAVSVALGQTVRITXRGDSLRKYYASWYQQKPRQAPQLVIYHKNNRASGIPDRFSGSISGNTASLTITGAQAEDEAAYFXNSRDTSGNYLVFGGGTKVTVLG

SEQ ID NO: 365 - protein, 112 aa, Artificial Sequence
  Synthesized sequence with two or more selenocysteine residues substituted for two or more cysteine residues
  VARIANT (1)...(112): Xaa = selenocysteine or cysteine
DVVMTQSPLSLPVTPGEPASISXRSSQSIVHSNGNTYLEWYLQKPGQSPQLLIYKASNRFSGVPDRFSGSGSGTDFTLKISRVEAEDVGVYYXFQGSRLGPSFGQGTKLEIK

SEQ ID NO: 366 - protein, 111 aa, Artificial Sequence
  Synthesized sequence with two or more selenocysteine residues substituted for two or more cysteine residues
  VARIANT (1)...(111): Xaa = selenocysteine or cysteine
DIVLTQSPASLAVSLGQRATISXRASESVGNFGISFMNWFQQKPGQPPKLLIYTASNQGSGVPARFSGSGSGTDFSLNIHPMEEDDSAMYFXQQSKEIPWTFGGGTKLEIK

SEQ ID NO: 367 - protein, 107 aa, Artificial Sequence
  Synthesized sequence with two or more selenocysteine residues substituted for two or more cysteine residues
  VARIANT (1)...(107): Xaa = selenocysteine or cysteine
DIQMTQSPSSLSASVGDRVTITXRASQGIRSALNWYQQKPGKAPKLLIYNGSTLQSGVPSRFSGSGSGTDFTLTISSLQPEDFAVYYXQQFDGDPTFGQGTKVEIKR

SEQ ID NO: 368 - protein, 108 aa, Artificial Sequence
  Synthesized sequence with two or more selenocysteine residues substituted for two or more cysteine residues
  VARIANT (1)...(108): Xaa = selenocysteine or cysteine
DIQMTQSPSSLSASVGDRVTITXRASQTIWSYLNWYQQRPGKAPNLLIYAASSLQSGVPSRFSGRGSGTDFTLTISSLQAEDFATYYXQQSYSIPQTFGQGTKLEIKR

SEQ ID NO: 369 - protein, 109 aa, Artificial Sequence
  Synthesized sequence with two or more selenocysteine residues substituted for two or more cysteine residues
  VARIANT (1)...(109): Xaa = selenocysteine or cysteine
RIVMTQSPGTLSVSPGETATLSXRASQSFSNMLAWYQQKSGQPPRLLIYGVSTRAAGVPARFSGSGSGTEFTLTISNLQSEDFAVYYXQQYGDWPRYTFGQGTKVERKR

SEQ ID NO: 370 - protein, 108 aa, Artificial Sequence
  Synthesized sequence with two or more selenocysteine residues substituted for two or more cysteine residues
  VARIANT (1)...(108): Xaa = selenocysteine or cysteine
SYVLTQPPSVSVAPGQTARITXGGNNIESKSVHWYQQKPGQAPVLVVYDDSDRPSGIPERFSGSNSGNTATLTISRVEAGDEADYYXQVWDSNTDHWVFGGGTKLTVL

SEQ ID NO: 371 - protein, 107 aa, Artificial Sequence
  Synthesized sequence with two or more selenocysteine residues substituted for two or more cysteine residues
  VARIANT (1)...(107): Xaa = selenocysteine or cysteine
DIQMTQSPSSLSASVGDRVTITXKASQDINKYIAWYQQKPGKAPKLLIHYTSTLQPGIPSRFSGSGSGRDYTFTISSLQPEDIATYYXLQYDNLLFTFGQGTKLEIK

SEQ ID NO: 372 - protein, 107 aa, Artificial Sequence
  Synthesized sequence with two or more selenocysteine residues substituted for two or more cysteine residues
  VARIANT (1)...(107): Xaa = selenocysteine or cysteine
DIQMTQSPSTLSASIGDRVTITXRASEGIYHWLAWYQQKPGKAPKLLIYKASSLASGAPSRFSGSGSGTDFTLTISSLQPDDFATYYXQQYSNYPLTFGGGTKLEIK

SEQ ID NO: 373 - protein, 112 aa, Artificial Sequence
  Synthesized sequence with two or more selenocysteine residues substituted for two or more cysteine residues
  VARIANT (1)...(112): Xaa = selenocysteine or cysteine
DIELTQSPASLAVSLGQRATISXKASQSVDYDGDSYLNRFQQKPGQPPKLLIYTASNLESGIPARFSGSGSGTDFTLNIHPVEEEDAATYYXQQSNEDPWTFGGGTKLEIKR

SEQ ID NO: 374 - protein, 113 aa, Artificial Sequence
  Synthesized sequence with two or more selenocysteine residues substituted for two or more cysteine residues
  VARIANT (1)...(113): Xaa = selenocysteine or cysteine
DVLLTQTPLTLSITIGQPASISXKSSQSLLHSDGKTYLNWLLQRPGQSPKRLIYLVSKLDSGVPDRFTGSGSGTDFTLKISRVEAEDLGLYYXWQGTHFPQTFGGGTKLEIKR

SEQ ID NO: 375 - protein, 107 aa, Artificial Sequence
  Synthesized sequence with two or more selenocysteine residues substituted for two or more cysteine residues
  VARIANT (1)...(107): Xaa = selenocysteine or cysteine
DILLTQSPATLSLSPGERATLSXRASQNIGTSIQWYQQKPGQAPRLLIRSSSESISGIPSRFSGSGSGTDFTLTISSLEPEDFAVYYXQQSNTWPFTFGQGTKLEIK

SEQ ID NO: 376 - protein, 108 aa, Artificial Sequence
  Synthesized sequence with two or more selenocysteine residues substituted for two or more cysteine residues
  VARIANT (1)...(108): Xaa = selenocysteine or cysteine
DIQMTQTTSSLSASLGDRVTISXRASQDISFFLNWYQQKPDGTVKLLIYYTSRYHSGVPSRFSGSGSGTDFSLTINNLEQEDFATYFXQHGNTLPWTFGGGTKLEIKR

SEQ ID NO: 377 - protein, 108 aa, Artificial Sequence
  Synthesized sequence with two or more selenocysteine residues substituted for two or more cysteine residues
  VARIANT (1)...(108): Xaa = selenocysteine or cysteine
DVQITQSPSYLAASPGETITINXRASKSISKYLAWYQEKPVKTNKLLIYSGSTLQSGIPSRFSGSGSGTDFTLTISSLEPEDFAMYYXQQHYEYPLTFGAGTKLELKR

SEQ ID NO: 378 - protein, 108 aa, Artificial Sequence
  Synthesized sequence with two or more selenocysteine residues substituted for two or more cysteine residues
  VARIANT (1)...(108): Xaa = selenocysteine or cysteine
EIVLTQSPGTLSLSPGERATLSXRASQSVSSSYLAWYQQKPGQAPRLLIYGASSRATGIPDRFSGSGSGTDFTLTISRLEPEDFAVYYXQQYGSSPWTFGQGTKVEIK

SEQ ID NO: 379 - protein, 108 aa, Artificial Sequence
  Synthesized sequence with two or more selenocysteine residues substituted for two or more cysteine residues
  VARIANT (1)...(108): Xaa = selenocysteine or cysteine
DIVMTQSHKFMSTSVGDRVSITXKASQDVSTAVAWYQQKPGQSPKLLIYLTSYRNTGVPDRFTGSGSGTDFTFTISSVQAEDLAVYYXQQHYKTPYSFGGGTKLERLR

SEQ ID NO: 380 - protein, 107 aa, Artificial Sequence
  Synthesized sequence with two or more selenocysteine residues substituted for two or more cysteine residues
  VARIANT (1)...(107): Xaa = selenocysteine or cysteine
DIQMTQSPASLSASVGETVTITXRASENIYSYLTWYQQKQRKSPQLLVYNAKTLAEGVPSRFSGSGSGTQFSLKINSLQPEDFGTYYXQHHYATPWTFGGGTKVEIK

SEQ ID NO: 381 - protein, 108 aa, Artificial Sequence
  Synthesized sequence with two or more selenocysteine residues substituted for two or more cysteine residues
  VARIANT (1)...(108): Xaa = selenocysteine or cysteine
QSQLTQPPSVSVAPGQTARITXGGDNIGSKSVNWFQQKPGQAPVLVVYDDNERPSGISERFSGSNSGNTATLTISRVEAGDEADYYXQVWDSSSDHVVFGGGTKLTVL

SEQ ID NO: 382 - protein, 107 aa, Artificial Sequence
  Synthesized sequence with two or more selenocysteine residues substituted for two or more cysteine residues
  VARIANT (1)...(107): Xaa = selenocysteine or cysteine
DIVMTQSHKFMSTSVGDRVSITXKASQDVGSAVAWYQQKPGQSPKLLIYWASTRHTGVPDRFTGSGSGTDFTLTISSLQSEDLADYFXQQYSSYPLTFGSGTKLEIK

SEQ ID NO: 383 - protein, 106 aa, Artificial Sequence
  Synthesized sequence with two or more selenocysteine residues substituted for two or more cysteine residues
  VARIANT (1)...(106): Xaa = selenocysteine or cysteine
DVVMTQTPLTLSVNIGQPASISXKSSQSLLYSNGKTYLNWLLQRPGQSPRRLIYQVSKLDSGVPDRFTGSGSGTDFTLKISRVEAEDLGVYYXVQGTDFPQTFGGG

SEQ ID NO: 384 - protein, 108 aa, Artificial Sequence
  Synthesized sequence with two or more selenocysteine residues substituted for two or more cysteine residues
  VARIANT (1)...(108): Xaa = selenocysteine or cysteine
DIQMTQSPASLSASVGDTVTITXRASENIYSFLAWYHQKQGRSPQLLVYHAKTLAEGVPSRFSGSGSGTQFSLKINSLQAEDFGSYYXQHYYGSPLTFGAGTKLEVKR

SEQ ID NO: 385 - protein, 109 aa, Artificial Sequence
  Synthesized sequence with two or more selenocysteine residues substituted for two or more cysteine residues
  VARIANT (1)...(109): Xaa = selenocysteine or cysteine
QIVLTQSPAIMSASLGERVTMTXTASSSVSSSYFHWYQQKPGSSPKLWIYSTSNLASGVPARFSGSGSGTSYSLTISTMEAEDAVTYYXHQYHRSPWTFGGGTKLEIKR

SEQ ID NO: 386 - protein, 96 aa, Artificial Sequence
  Synthesized sequence with two or more selenocysteine residues substituted for two or more cysteine residues
  VARIANT (1)...(96): Xaa = selenocysteine or cysteine
SYVLTQPPSVSVSPGQTASITXSGDKLGDKYAXWYQQKPGQSPVLVIYQDSKRPSGIPERFSGSNSGNTATLTISGTQAMDEADYYXQAWDSSIVV

SEQ ID NO: 387 - protein, 107 aa, Artificial Sequence
  Synthesized sequence with two or more selenocysteine residues substituted for two or more cysteine residues
  VARIANT (1)...(107): Xaa = selenocysteine or cysteine
DIQMTQTSSLSASLGDRVTISXRASQDISNYLNWYQQKPDGTVKFLIYYTSRLHSGVPSRFSGSGSGTDYSLTISYLEPEDIATYFXQQGEALPWTFGGGTKLEIKR

SEQ ID NO: 388 - protein, 111 aa, Artificial Sequence
  Synthesized sequence with two or more selenocysteine residues substituted for two or more cysteine residues
  VARIANT (1)...(111): Xaa = selenocysteine or cysteine
QSALTQPASVSGSPGQSITISXTGTSNDVGAYNYVSWYQQHPGKAPKLMISEVNKRPSGVSNRFSGSKSGNTASLTISGLQAEDEADYYXSSFTSGLPWVVFGGGTKLTVL

SEQ ID NO: 389 - protein, 113 aa, Artificial Sequence
  Synthesized sequence with two or more selenocysteine residues substituted for two or more cysteine residues
  VARIANT (1)...(113): Xaa = selenocysteine or cysteine
DIQMTQSPSSLSASVGDRVTITXKSIQTLLYSSNQKNYLAWYQQKPGKAPKLLIYWASIRKSGVPSRFSGSGSGTDFTLTISSLQPEDFATYYXQQYYSYPLTFGGGTKLEIK

SEQ ID NO: 390 - protein, 107 aa, Artificial Sequence
  Synthesized sequence with two or more selenocysteine residues substituted for two or more cysteine residues
  VARIANT (1)...(107): Xaa = selenocysteine or cysteine
DIQMTQSPSSLSASVGDRVTITXKASQSVSNDVAWYQQKPGKAPKLLIYFATNRYTGVPSRFSGSGYGTDFTLTISSLQPEDFATYYXQQDYSSPWTFGQGTKVEIK

SEQ ID NO: 391 - protein, 109 aa, Artificial Sequence
  Synthesized sequence with two or more selenocysteine residues substituted for two or more cysteine residues
  VARIANT (1)...(109): Xaa = selenocysteine or cysteine
QAVVTQESALTTSPGETVTLTXRSSTGAVTTSNYANWVQEKPDHLFTGLIGGTNNRAPGIPARFSGSLIGDKAALTITGAQTEDEAIYFXALWYSNHWVFGGGTKLTVL

SEQ ID NO: 392 - protein, 111 aa, Artificial Sequence
  Synthesized sequence with two or more selenocysteine residues substituted for two or more cysteine residues
  VARIANT (1)...(111): Xaa = selenocysteine or cysteine
DIVLTQSPASLAVSLGQRATISXRASQSVSTSRYSYMHWYQQIQGQPPKLLIKYASNLESGVPARFSGSGSGTDFTLNIHPVEEEDTATYHXQHSWEIPYTFGGGTTLEIK

SEQ ID NO: 393 - protein, 112 aa, Artificial Sequence
  Synthesized sequence with two or more selenocysteine residues substituted for two or more cysteine residues
  VARIANT (1)...(112): Xaa = selenocysteine or cysteine
DIVMTQSPLSLPVTPGEPASISXRSSQSIVHSNGNTYLQWYLQKPGQSPQLLIYKVSNRLYGVPDRFSGSGSGTDFTLKISRVEAEDVGVYYXFQGSHVPWTFGQGTKVEIK

SEQ ID NO: 394 - protein, 114 aa, Artificial Sequence
  Synthesized sequence with two or more selenocysteine residues substituted for two or more cysteine residues
  VARIANT (1)...(114): Xaa = selenocysteine or cysteine
DIVLTQSPDSLAVSLGERATINXKSSQSVLYSSNNKNYLAWYQQKPGQPPKLLIYWASTRESGVPDRFSGSGSGTDFTPAISSLQAEDVAVYYXQQYYSTPQLTFGGGTKVDIK

SEQ ID NO: 395 - protein, 110 aa, Artificial Sequence
  Synthesized sequence with two or more selenocysteine residues substituted for two or more cysteine residues
  VARIANT (1)...(110): Xaa = selenocysteine or cysteine
NFMLTQDAAVSVALGQTVRITXQGDSLRSYYASWYQQKPGQAPVLVVYGKNNRPSGIPDRFSGSSSGNTASLTITGAQAEDEADYYXNSRDSSGNPWAFGGGTKVTVLAS

SEQ ID NO: 396 - protein, 108 aa, Artificial Sequence; identical to SEQ ID NO: 315
  Synthesized sequence with two or more selenocysteine residues substituted for two or more cysteine residues
  VARIANT (1)...(108): Xaa = selenocysteine or cysteine

SEQ ID NO: 397 - protein, 111 aa, Artificial Sequence
  Synthesized sequence with two or more selenocysteine residues substituted for two or more cysteine residues
  VARIANT (1)...(111): Xaa = selenocysteine or cysteine
EIVLTQSPGTLSLSPGERATLSXKASQSVSIGPIHLMHWYQQKPGQAPRLLIYGASNPESGIPDRFSGSGSGTDFTLTISRLEPEDFAVYYXQQGKESPRTFGQGTKLEIK

SEQ ID NO: 398 - protein, 107 aa, Artificial Sequence
  Synthesized sequence with two or more selenocysteine residues substituted for two or more cysteine residues
  VARIANT (1)...(107): Xaa = selenocysteine or cysteine
DIQMTQSPSTLSASVGDRVIITXRASQRISSWLAWYQQKPGKAPNLLIYKASILESGVPSRFSGSGSGTEFTLTISSLQPDDFATYYXQQYNSYSYTFGQGTKLEIK

SEQ ID NO: 399 - protein, 107 aa, Artificial Sequence
  Synthesized sequence with two or more selenocysteine residues substituted for two or more cysteine residues
  VARIANT (1)...(107): Xaa = selenocysteine or cysteine
EIVLTQSPATLSLSPGERATLSXWASQSISRYLVWYQQKXGQAPRLLIYEASKRATGIPVRFSGSGSGTDFTLTISSLESEDFAVYYXQQRFNWPLTFGGGTKVEIK

SEQ ID NO: 400 - protein, 108 aa, Artificial Sequence
  Synthesized sequence with two or more selenocysteine residues substituted for two or more cysteine residues
  VARIANT (1)...(108): Xaa = selenocysteine or cysteine
EIVLTQSPGTLSLSPGERVTLSXRASQSVSSSYLAWYQQKPGQAPRLLIYGASSRATGIPDRFSGSGSGTDFTLTISRLEPEDFAVYYXQQYGSSPRTFGQGTKVEIK

SEQ ID NO: 401 - protein, 107 aa, Artificial Sequence
  Synthesized sequence with two or more selenocysteine residues substituted for two or more cysteine residues
  VARIANT (1)...(107): Xaa = selenocysteine or cysteine
DIQMTQSPSSLSASVGDRVTITXQASQDISNYLNWYQQKPGKAPKLLINDASNLETGVPSRFSGSGSGTDFTFTISSLQPEDIATYYXQHYDSLPLTFGQGTRLEIK

SEQ ID NO: 402 - protein, 111 aa, Artificial Sequence
  Synthesized sequence with two or more selenocysteine residues substituted for two or more cysteine residues
  VARIANT (1)...(111): Xaa = selenocysteine or cysteine
DIVMTQTPLSSPVTLGQPASISXRSSQSLVHSDGNTYLSWLHQRPGQPPRLLIYKISNRFSGVPDRFSGSGAGTDFTLQISRVEAEDVGIYYXMQATQFPTFGGGTKVEIK

SEQ ID NO: 403 - protein, 110 aa, Artificial Sequence
  Synthesized sequence with two or more selenocysteine residues substituted for two or more cysteine residues
  VARIANT (1)...(110): Xaa = selenocysteine or cysteine
QPGLTQPPSVSVAPGQTARITXGGNNIGSKSVHWYQQKPGQAPVLVVYDDSDRPSGIPERFSGSNSGNTATLTISRVEAGDEADYYXQVWDSSSDHYVFGTGTKVTVLGQ

SEQ ID NO: 404 - protein, 108 aa, Artificial Sequence
  Synthesized sequence with two or more selenocysteine residues substituted for two or more cysteine residues
  VARIANT (1)...(108): Xaa = selenocysteine or cysteine
QDIELTQPPSVSVAPGQTARISXSGDSLGKKYAHWYQQKPGQAPVLVIYEDSNRPSGIPERFSGSNSGNTATLTISGTQAEDEADYYXQSYGYSSIVFGGGTKLTVLG

SEQ ID NO: 405 - protein, 113 aa, Artificial Sequence
  Synthesized sequence with two or more selenocysteine residues substituted for two or more cysteine residues
  VARIANT (1)...(113): Xaa = selenocysteine or cysteine
DVVMTQTPLSLPVSLGDQASISXRSGQSLVHSNGNTYLHWYLQKPGQSPKLLIYTVSNRFSGVPDRFSGSGSGSDFTLKISRVEAEDLGVYFXSQNTFVPWTFGGGTKLEIKR

SEQ ID NO: 406 - protein, 114 aa, Artificial Sequence
  Synthesized sequence with two or more selenocysteine residues substituted for two or more cysteine residues
  VARIANT (1)...(114): Xaa = selenocysteine or cysteine
DILMTQSPSSLTVSAGEKVTMSXKSSQSLLASGNQNNYLAWHQQKPGRSPKMLIIWASTRVSGVPDRFIGSGSGTDFTLTINSVQAEDLAVYYXQQSYSAPLTFGAGTKLELKR

SEQ ID NO: 407 - protein, 91 aa, Artificial Sequence
  Synthesized sequence with two or more selenocysteine residues substituted for two or more cysteine residues
  VARIANT (1)...(91): Xaa = selenocysteine or cysteine
DRVTITXRASQGINSAFAWYQQKPGKAPKLLIYDASSLESGVPSRFSGSGSGTDFTLTISSLQPEDFATYYXQQFNSYPLTFGGGTKVEIK

SEQ ID NO: 408 - protein, 111 aa, Artificial Sequence
  Synthesized sequence with two or more selenocysteine residues substituted for two or more cysteine residues
  VARIANT (1)...(111): Xaa = selenocysteine or cysteine
DIVLTQSPASLAVSLGQRATISXRASQSVSTSSYSYMHWYQQKPGQPPKLLIKYASNLESGVPARFSGSGSGTDFTLNIHPVEEEDTATYYXQHSWEIPYTFGGGTKLEIK

SEQ ID NO: 409 - protein, 112 aa, Artificial Sequence
  Synthesized sequence with two or more selenocysteine residues substituted for two or more cysteine residues
  VARIANT (1)...(112): Xaa = selenocysteine or cysteine
DVLMTQTPLSSPVTLGQPASISXRSSQSIIHSNGNTYLEWYLQKPGQSPQLLIYKVSNRFSGVPDRFTGSGSGTDFTLKISRVEAEDVGVYYXFQGSHVPWTFGQGTKLEIK

SEQ ID NO: 410 - protein, 108 aa, Artificial Sequence
  Synthesized sequence with two or more selenocysteine residues substituted for two or more cysteine residues
  VARIANT (1)...(108): Xaa = selenocysteine or cysteine
DIQMTQSPSSLSASVGDRVTITXKASQNVGTNVVWYQQKPGKAPKALIHSASYRYSGVPSRFSGSGSGTDFTLTISSLQPEDFATYYXQQYKTYPYTFGQGTKVEIKR

SEQ ID NO: 411 - protein, 108 aa, Artificial Sequence
  Synthesized sequence with two or more selenocysteine residues substituted for two or more cysteine residues
  VARIANT (1)...(108): Xaa = selenocysteine or cysteine
EIVLTQSPGTLSLSPGERATLSXRASQPISISVHWYQQKPGQAPRLLIYFASQSISGIPDRFSGSGSGTDFTLTISRLEPEDFAVYYXQQTFSLPYTFGQGTKVEIKR

SEQ ID NO: 412 - protein, 108 aa, Artificial Sequence
  Synthesized sequence with two or more selenocysteine residues substituted for two or more cysteine residues
  VARIANT (1)...(108): Xaa = selenocysteine or cysteine
DILMTQSPSSMSVSLGDTVSITXHASQDINSNIGWLQQKPGKSFKGLIYHGTNLEDGVPSRFSGSGSGADYSLTISSLESEDFADYYXVQYAQFPWTFGGGTKLEIKR

SEQ ID NO: 413 - protein, 107 aa, Artificial Sequence
  Synthesized sequence with two or more selenocysteine residues substituted for two or more cysteine residues
  VARIANT (1)...(107): Xaa = selenocysteine or cysteine
QIVLSQSPVILSASPGEKVTMTXRASSSVSFMHWYQQKPGSSPKPWIYATSNLTSGVPTRFSGSGSGTSYSLTISRVEAEDAATYYXQQWSSNPFTFGSGTKLEIKR

SEQ ID NO: 414 - protein, 112 aa, Artificial Sequence
  Synthesized sequence with two or more selenocysteine residues substituted for two or more cysteine residues
  VARIANT (1)...(112): Xaa = selenocysteine or cysteine
DVVMTQSPLSLPVTLGQPASISXRSSQSIVHSDGNTYLEWYQQRPGQSPRRLIYKVSNRFSGVPDRFSGSGSGTDFTLKISRVEAEDVGVYYXFQGSHAPWTFGGGTKVEIK

SEQ ID NO: 415 - protein, 110 aa, Artificial Sequence
  Synthesized sequence with two or more selenocysteine residues substituted for two or more cysteine residues
  VARIANT (1)...(110): Xaa = selenocysteine or cysteine
DIVITQDELSNPVIFGESVSISXRSSKSLLYKDGKTYLNWYLQRPGQSPQLLIYLMSTRASGVSDRFSGSGSGTDFTLEISRVKAEDVGVYYXQQVVEYPFTFGSGTKWK

SEQ ID NO: 416 - protein, 109 aa, Artificial Sequence
  Synthesized sequence with two or more selenocysteine residues substituted for two or more cysteine residues
  VARIANT (1)...(109): Xaa = selenocysteine or cysteine
QIVLTQSPAIMSASLGERVTMTXTASSSVSSSYLHWYQQKPGSSPKLWIYSTSNLASGVPARFSGSGSGTFYSLTISSMEAEDDATYYXHQYYRLPPITFGAGTKLELK

SEQ ID NO: 417 - protein, 107 aa, Artificial Sequence
  Synthesized sequence with two or more selenocysteine residues substituted for two or more cysteine residues
  VARIANT (1)...(107): Xaa = selenocysteine or cysteine
DIQMTQSPASQSASLGESVTITXLASQTIDTWLAWYQQKPGKSPQLLIYAATNLADGVPSRFSGSGSGTKFSFKISSLQAEDFVNYYXQQVYSSPFTFGAGTKLELK

SEQ ID NO: 418 - protein, 107 aa, Artificial Sequence
  Synthesized sequence with two or more selenocysteine residues substituted for two or more cysteine residues
  VARIANT (1)...(107): Xaa = selenocysteine or cysteine
QIVLTQSPAIMSASPGEKVTMTXSASSSVSYMHWYQQKSGTSPKRWIYDTSKLASGVPARFSGSGSGTSYSLTISSMEAEDAATYYXQQWSSNPFTFGSGTKLEIKR

SEQ ID NO: 419 - protein, 106 aa, Artificial Sequence
  Synthesized sequence with two or more selenocysteine residues substituted for two or more cysteine residues
  VARIANT (1)...(106): Xaa = selenocysteine or cysteine
QIVLSQSPAILSASPGEKVTMTXRASSSVSYMHWYQQKPGSSPKPWIYAPSNLASGVPARFSGSGSGTSYSLTISRVEAEDAATYYXQQWSFNPPTFGAGTKLELK

SEQ ID NO: 420 - protein, 105 aa, Artificial Sequence
  Synthesized sequence with two or more selenocysteine residues substituted for two or more cysteine residues
  VARIANT (1)...(105): Xaa = selenocysteine or cysteine
AALTQPSSVSANPGETVKITXSGGSGYYGWYQQQKSPGSAPVTVIYQNDKRPSDIPSRFSGSGSGSTNTLTITGVQAEDEAVYFXGRYDSTDSGIFGAGTTLTVL

SEQ ID NO: 421 - protein, 107 aa, Artificial Sequence
  Synthesized sequence with two or more selenocysteine residues substituted for two or more cysteine residues
  VARIANT (1)...(107): Xaa = selenocysteine or cysteine
DIVMTQSTSSLSASLGDRVTISXRASQDISNYLNWYQQKPDGTVKLLIYYTSRLHSGVPSRFSGSGSGTDYSLTISNLEQEDIATYFXQQGNTLPYTFGGGTKLEIK

SEQ ID NO: 422 - protein, 107 aa, Artificial Sequence
  Synthesized sequence with two or more selenocysteine residues substituted for two or more cysteine residues
  VARIANT (1)...(107): Xaa = selenocysteine or cysteine
ELQMTQSPSSVSASVGDRVTITXRASSSVSYLAWYQQKPGKAPKLLLNGTSSLQSGVPSRFSGSGSGTDFTLTISSLQPEDFATYYXQQRSSYPFTFGGGTKVEIKR

SEQ ID NO: 423 - protein, 113 aa, Artificial Sequence
  Synthesized sequence with two or more selenocysteine residues substituted for two or more cysteine residues
  VARIANT (1)...(113): Xaa = selenocysteine or cysteine
DIQMTQSPSSLSASVGDRVTITXRSSQTLVHSNGNTFLHWYQQKPGKAPKLLIYKVSNRFSGVPSRFSGSGSGTDYTFTISSLQPEDIATYYXSQGTHAPFTFGQGTKVEIKR

SEQ ID NO: 424 - protein, 113 aa, Artificial Sequence
  Synthesized sequence with two or more selenocysteine residues substituted for two or more cysteine residues
  VARIANT (1)...(113): Xaa = selenocysteine or cysteine
DIVMTQAAFSNPVTLGTSASISXRSSKSLLHSNGITYLYWYLQKPGQSPQVLIYQMSNLASGVPDRFSSSGSGTDFTLRISRVEAEDVGVYYXAQNLELPWTFGGGTKLEIKR

SEQ ID NO: 425 - protein, 108 aa, Artificial Sequence
  Synthesized sequence with two or more selenocysteine residues substituted for two or more cysteine residues
  VARIANT (1)...(108): Xaa = selenocysteine or cysteine
DIVLTQSPSSMSASLGDRVTITXQASQDIGNNLIWFQQKPGKSPRPMIYYATNLANGVPSRFSGSGSGTSYSLTISSMEAEDAATYYXQQWSSNPYTFGGGTKLEIKR

SEQ ID NO: 426 - protein, 107 aa, Artificial Sequence
  Synthesized sequence with two or more selenocysteine residues substituted for two or more cysteine residues
  VARIANT (1)...(107): Xaa = selenocysteine or cysteine
QVVLSQSPAILSASPGERVTLTXRASSSVNYMHWYQQKPGSSPKAWIYATSNLASGVPDRFSASGSGTSYSLTISRVEAEDAATYYXQQWRTNPPTFGAGTKLELKR

SEQ ID NO: 427 - protein, 112 aa, Artificial Sequence
  Synthesized sequence with two or more selenocysteine residues substituted for two or more cysteine residues
  VARIANT (1)...(112): Xaa = selenocysteine or cysteine
DVVMTQTPLSLPVSLGDQASFSXRSSQSLVHSNGNTYLHWYLQKPGQSPKLLIYKVSNRFSGVPDRFSGSGSGTDFTLKISRVEAEDLGVYFXSQSTHVPTFGGGTKLEIKR

SEQ ID NO: 428 - protein, 112 aa, Artificial Sequence
  Synthesized sequence with two or more selenocysteine residues substituted for two or more cysteine residues
  VARIANT (1)...(112): Xaa = selenocysteine or cysteine
DVLMTQTPLSLSVTPGQPASISXRSGQNIVHSNGNTYLEWYLQKPGQSPKLLIYKVSNRFFGVPDRISGSGSGTDFTLKISRVEAEDVGVYFXFQGSHVPFTFGQGTKLEIK

SEQ ID NO: 429 - protein, 108 aa, Artificial Sequence
  Synthesized sequence with two or more selenocysteine residues substituted for two or more cysteine residues
  VARIANT (1)...(108): Xaa = selenocysteine or cysteine
DIQMTQSPSSLSASVGDRVTITXRASQDISNYLAWFQRKPGKAPKSLIYAASSLHSKVPTQFSGSGSGTDFTLTISSLQPEDFATYYXLQYSTYPITFGGGTKVEIKR

SEQ ID NO: 430 - protein, 115 aa, Artificial Sequence
  Synthesized sequence with two or more selenocysteine residues substituted for two or more cysteine residues
  VARIANT (1)...(115): Xaa = selenocysteine or cysteine
MADVLMTQTPLSLPVSLGDQASISXRSSQSLVHSNGNTYLHWYLQKPGQSPKLLIYKVSNRFSGVPDRFSGSGSGTDFTLKISRVEAEDLGVYFXSQSTHVPFTFGSGTKLELKR

SEQ ID NO: 431 - protein, 107 aa, Artificial Sequence
  Synthesized sequence with two or more selenocysteine residues substituted for two or more cysteine residues
  VARIANT (1)...(107): Xaa = selenocysteine or cysteine
DIQMTQSPSSLSASVGDRVTITXRASQGIRNYLAWYQQKPGKAPKLLIYAASTLQSGVPSRFSGSGSGTDFTLTISSLQPEDVATYYXQRYNRAPYTFGQGTKVEIK

SEQ ID NO: 432 - protein, 105 aa, Artificial Sequence
  Synthesized sequence with two or more selenocysteine residues substituted for two or more cysteine residues
  VARIANT (1)...(105): Xaa = selenocysteine or cysteine
QIVSTQSPAIMSASPGEKVTMTXSASSSRSYMQWYQQKPGTSPKRWIYDTSKLASGVPARFSGSGSGTSYSLTISSMEAEDAATYYXHQRSSYTFGGGTKLEIKR

SEQ ID NO: 433 - protein, 109 aa, Artificial Sequence
  Synthesized sequence with two or more selenocysteine residues substituted for two or more cysteine residues
  VARIANT (1)...(109): Xaa = selenocysteine or cysteine
SSELTQDPAVSVALGQTVRVTXQGDSLRSYYASWYQQKPGQAPVLVIYGKNNRPSGIPDRFSGSSSGNTASLTITGAQAEDEADYYXSSRDSSGNHWVFGGGTELTVLG

SEQ ID NO: 434 - protein, 111 aa, Artificial Sequence
  Synthesized sequence with two or more selenocysteine residues substituted for two or more cysteine residues
  VARIANT (1)...(111): Xaa = selenocysteine or cysteine
DIQLTQSPASLAVSLGQRATISXKASQSVDYDGDSYLNWYQQIPGQPPKLLIYDASNLVSGIPPRFSGSGSGTDFTLNIHPVEKVDAATYHXQQSTEDPWTFGGGTKLEIK

SEQ ID NO: 435 - protein, 107 aa, Artificial Sequence
  Synthesized sequence with two or more selenocysteine residues substituted for two or more cysteine residues
  VARIANT (1)...(107): Xaa = selenocysteine or cysteine
EIVLTQSPDFQSVTPKEKVTITXRASQSIGSSLHWYQQKPDQSPKLLIKYASQSFSGVPSRFSGSGSGTDFTLTINSLEAEDAAAYYXHQSSSLPFTFGPGTKVDIK

SEQ ID NO: 436 - protein, 112 aa, Artificial Sequence
  Synthesized sequence with two or more selenocysteine residues substituted for two or more cysteine residues
  VARIANT (1)...(112): Xaa = selenocysteine or cysteine
DIVMTQSPLSVPVTPGEPVSISXRSSKSLLHSNGNTYLYWFLQRPGQSPQLLIYRMSNLVSGVPDRFSGSGSGTAFTLRISRVEAEDVGVYYXLQHLEYPFTFGPGTKLELK

SEQ ID NO: 437 - protein, 108 aa, Artificial Sequence
  Synthesized sequence with two or more selenocysteine residues substituted for two or more cysteine residues
  VARIANT (1)...(108): Xaa = selenocysteine or cysteine
DIQMTQSPSSLSASVGDRVTITXKASQNVGTNVAWYQQKPGKAPKALIYSASFLYSGVPYRFSGSGSGTDFTLTISSLQPEDFATYYXQQYNIYPLTFGQGTKVEIKR

SEQ ID NO: 438 - protein, 108 aa, Artificial Sequence
  Synthesized sequence with two or more selenocysteine residues substituted for two or more cysteine residues
  VARIANT (1)...(108): Xaa = selenocysteine or cysteine
DILLTQSPVILSVSPGERVSFSXRASQSIGTNIHWYQQRTNGSPRLLIKYASESISGIPSRFSGSGSGTDFTLSINSVESEDIADYYXQQNNNWPTTFGAGTKLELKR

SEQ ID NO: 439 - protein, 113 aa, Artificial Sequence
  Synthesized sequence with two or more selenocysteine residues substituted for two or more cysteine residues
  VARIANT (1)...(113): Xaa = selenocysteine or cysteine
DIQMTQSPSSLSASVGDRVTITXRSTKSLLHSNGITYLYWYQQKPGKAPKLLIYQMSNLASGVPSRFSSSGSGTDFTLTISSLQPEDFATYYXAQNLEIPRTFGQGTKVELKR

SEQ ID NO: 440 - protein, 108 aa, Artificial Sequence
  Synthesized sequence with two or more selenocysteine residues substituted for two or more cysteine residues
  VARIANT (1)...(108): Xaa = selenocysteine or cysteine
DIQMTQSPSSLSASVGDRVTITXRASEDLYYNLAWYQRKPGKAPKLLIYDTYRLADGVPSRFSGSGSGTDYTLTISSLQPEDFASYYXQQYYKFPFTFGQGTKVEIKR

SEQ ID NO: 441 - protein, 108 aa, Artificial Sequence
  Synthesized sequence with two or more selenocysteine residues substituted for two or more cysteine residues
  VARIANT (1)...(108): Xaa = selenocysteine or cysteine
EIVLTQSPGTLSLSPGERATLSXRASQSVRGRYLAWYQQKPGQAPRLLIYGASSRATGIPDRFSGSGSGTDFTLTISRLEPEDFAVFYXQQYGSSPRTFGQGTKVEIK

SEQ ID NO: 442 - protein, 108 aa, Artificial Sequence
  Synthesized sequence with two or more selenocysteine residues substituted for two or more cysteine residues
  VARIANT (1)...(108): Xaa = selenocysteine or cysteine
DIQMTQSPSSLSASVGDRVTITXRASKTISKYLAWYQQKPGKAPKLLIYSGSTLQSGVPSRFSGSGSGTDFTLTISSLQPEDFATYYXQQHNEYPLTFGQGTKVEIKR

SEQ ID NO: 443 - protein, 108 aa, Artificial Sequence
  Synthesized sequence with two or more selenocysteine residues substituted for two or more cysteine residues
  VARIANT (1)...(108): Xaa = selenocysteine or cysteine
DIVMTQSPATLSVTPGDRVSLSXRASQSISDYLHWYQQKSHESPRLLIKSVSQSISGIPSRFSGSGSGSDFTLSINSVEPEDVGVYYXQNGHSFPLTFGAGTKLELKR

SEQ ID NO: 444 - protein, 111 aa, Artificial Sequence
  Synthesized sequence with two or more selenocysteine residues substituted for two or more cysteine residues
  VARIANT (1)...(111): Xaa = selenocysteine or cysteine
NFMLTQPHSVSESPGKTVTISXTRSSGSIASNYVQWYQQRPGSSPTTVIYEDNQRPSGVPDRFSGSIDSSSNSASLTISGLKTEDEADYYXQSYDGSNRWMFGGGTKLTVL

SEQ ID NO: 445 - protein, 108 aa, Artificial Sequence
  Synthesized sequence with two or more selenocysteine residues substituted for two or more cysteine residues
  VARIANT (1)...(108): Xaa = selenocysteine or cysteine
EIVLTQSPATLSLSPGERATLSXRASQSVYSYLAWYQQKPGQAPRLLIYDASNRATGIPARFSGSGSGTDFTLTISSLEPEDFAVYYXQQRSNWPPFTFGPGTKVDIK

SEQ ID NO: 446 - protein, 107 aa, Artificial Sequence
  Synthesized sequence with two or more selenocysteine residues substituted for two or more cysteine residues
  VARIANT (1)...(107): Xaa = selenocysteine or cysteine
DIQMTQSPSSLSASIGDRVTITXRASQGIRNYLAWYQQKPGKAPKLLIYAASTLQSGVPSRFSGSGSGTDFTLTISSLQPEDVATYYXQKYNSAPYAFGQGTKVEIK

SEQ ID NO: 447 - protein, 106 aa, Artificial Sequence
  Synthesized sequence with two or more selenocysteine residues substituted for two or more cysteine residues
  VARIANT (1)...(106): Xaa = selenocysteine or cysteine
QIVLSQSPAILSASPGEKVTMTXRASSSVSYIHWFQQKPGSSPKPWIYATSNLASGVPVRFSGSGSGTSYSLTISRVEAEDAATYYXQQWTSNPPTFGGGTKLEIK

SEQ ID NO: 448 - protein, 107 aa, Artificial Sequence
  Synthesized sequence with two or more selenocysteine residues substituted for two or more cysteine residues
  VARIANT (1)...(107): Xaa = selenocysteine or cysteine
DILLTQSPAILSVSPGERVSFSXRASQFVGSSIHWYQQRTNGSPRLLIKYASESMSGIPSRFSGSGSGTDFTLSINTVESEDIADYYXQQSHSWPFTFGSGTNLEVK

SEQ ID NO: 449 - protein, 108 aa, Artificial Sequence
  Synthesized sequence with two or more selenocysteine residues substituted for two or more cysteine residues
  VARIANT (1)...(108): Xaa = selenocysteine or cysteine
EIVLTQSPGTLSLSPGERATLSXRASQSVGSSYLAWYQQKPGQAPRLLIYGAFSRATGIPDRFSGSGSGTDFTLTISRLEPEDFAVYYXQQYGSSPWTFGQGTKVEIK

SEQ ID NO: 450 - protein, 106 aa, Artificial Sequence
  Synthesized sequence with two or more selenocysteine residues substituted for two or more cysteine residues
  VARIANT (1)...(106): Xaa = selenocysteine or cysteine
DIQLTQSPSSLSASVGDRVTITXKASQDVGTSVAWYQQKPGKAPKLLIYWTSTRHTGVPSRFSGSGSGTDFTFTISSLQPEDIATYYXQQYSLYRSFGQGTKVEIK

SEQ ID NO: 451 - protein, 107 aa, Artificial Sequence
  Synthesized sequence with two or more selenocysteine residues substituted for two or more cysteine residues
  VARIANT (1)...(107): Xaa = selenocysteine or cysteine
DIQMTQSPSSLSASVGDRVTITXRASQDIRYYLNWYQQKPGKAPKLLIYVASSLQSGVPSRFSGSGSGTEFTLTVSSLQPEDFATYYXLQVYSTPRTFGQGTKVEIK

SEQ ID NO: 452 - protein, 107 aa, Artificial Sequence
  Synthesized sequence with two or more selenocysteine residues substituted for two or more cysteine residues
  VARIANT (1)...(107): Xaa = selenocysteine or cysteine
DIQMTQSPSSLSASVGDRVTITXSASSSVTYMYWYQQKPGKAPKLLIYDTSNLASGVPSRFSGSGSGTDYTFTISSLQPEDIATYYXQQWSSHIFTFGQGTKVEIKR

SEQ ID NO: 453 - protein, 113 aa, Artificial Sequence
  Synthesized sequence with two or more selenocysteine residues substituted for two or more cysteine residues
  VARIANT (1)...(113): Xaa = selenocysteine or cysteine
DIVMTQSPDSLAVSLGERATINXKSSQSLLNSGNQKNYLAWYQQKPGQPPKLLIYGASTRESGVPDRFSGSGSGTDFTLTISSLQAEDVAVYYXQNVHSFPFTFGGGTKLEIK

SEQ ID NO: 454 - protein, 107 aa, Artificial Sequence
  Synthesized sequence with two or more selenocysteine residues substituted for two or more cysteine residues
  VARIANT (1)...(107): Xaa = selenocysteine or cysteine
DIQMTQTTSSLSASLGDRVTISXRASQDISNYLNWYQQKPDGTVKLLIYYTSILHSGVPSRFSGSGSGTDYSLTISNLEQEDFATYFXQQGNTLPWTFGXGTKLEIK

SEQ ID NO: 455 - protein, 106 aa, Artificial Sequence
  Synthesized sequence with two or more selenocysteine residues substituted for two or more cysteine residues
  VARIANT (1)...(106): Xaa = selenocysteine or cysteine
SIVMTQTPKFLLVSAGDRVTITXKASQSVTNDVAWYQQKPGQSPKLLIYYASNRYTGVPDRFTGSGYGTDFTFTISTVQAEDLAVYFXQQDYSSPYTFGGGTKLEI

SEQ ID NO: 456 - protein, 113 aa, Artificial Sequence
  Synthesized sequence with two or more selenocysteine residues substituted for two or more cysteine residues
  VARIANT (1)...(113): Xaa = selenocysteine or cysteine
DIQMTQSPSSLSASVGDRVTITXRSSQNIVHSNGNTYLDWYQQTPGKAPKLLIYKVSNRFSGVPSRFSGSGSGTDFTFTISSLQPEDIATYYXFQYSHVPWTFGQGTKLQITR

SEQ ID NO: 457 - protein, 108 aa, Artificial Sequence
  Synthesized sequence with two or more selenocysteine residues substituted for two or more cysteine residues
  VARIANT (1)...(108): Xaa = selenocysteine or cysteine
EIVLTQSPATLSLSPGERATLSXRASQSVSSYLAWYQQKPGQAPRLLIYDASNRATGIPARFSGSGSGTDFTLTISSLEPEDFAVYYXQQRSNWPITFGQGTRLEIKR

SEQ ID NO: 458 - protein, 113 aa, Artificial Sequence; identical to SEQ ID NO: 439
  Synthesized sequence with two or more selenocysteine residues substituted for two or more cysteine residues
  VARIANT (1)...(113): Xaa = selenocysteine or cysteine

SEQ ID NO: 459 - protein, 107 aa, Artificial Sequence
  Synthesized sequence with two or more selenocysteine residues substituted for two or more cysteine residues
  VARIANT (1)...(107): Xaa = selenocysteine or cysteine
EIVLTQSPATLSLSPGERATLSXRASENVYSYLAWYQQKPGQAPRLLIYFAKTLAEGIPARFSGSGSGTDFTLTISSLEPEDFAVYYXQHHSDNPWTFGQGTKVEIK

SEQ ID NO: 460 - protein, 108 aa, Artificial Sequence
  Synthesized sequence with two or more selenocysteine residues substituted for two or more cysteine residues
  VARIANT (1)...(108): Xaa = selenocysteine or cysteine
DIQMTQSPSSLSASVGDRVTITXKASQDVSIGVAWYQQKPGKAPKLLIYSASYRYTGVPSRFSGSGSGTDFTLTISSLQPEDFATYYXQQYYIYPYTFGQGTKVEIKR

SEQ ID NO: 461 - protein, 108 aa, Artificial Sequence
  Synthesized sequence with two or more selenocysteine residues substituted for two or more cysteine residues
  VARIANT (1)...(108): Xaa = selenocysteine or cysteine
EIVLTQSPGTLSLSPGERATLSXRASQSVSSSFLAWYQQKPGQAPRLLIYYASSRATGIPDRFSGSGSGTDFTLTISRLEPEDFAVYYXQQTGRIPPTFGQGTKVEIK

SEQ ID NO: 462 - protein, 108 aa, Artificial Sequence
  Synthesized sequence with two or more selenocysteine residues substituted for two or more cysteine residues
  VARIANT (1)...(108): Xaa = selenocysteine or cysteine
DIQLTQSPSSLSASVGDRVTITXSASQDISNYLNWYQQKPGKAPKVLIYFTSSLHSGVPSRFSGSGSGTDFTLTISSLQPEDFATYYXQQYSTVPWTFGQGTKVEIKR

SEQ ID NO: 463 - protein, 112 aa, Artificial Sequence
  Synthesized sequence with two or more selenocysteine residues substituted for two or more cysteine residues
  VARIANT (1)...(112): Xaa = selenocysteine or cysteine
DIVLTQSPATLSVSPGERATISXRASQRVSSSTYSYMHWYQQKPGQPPKLLIKYASNLESGVPARFSGSGSGTDFTLTISSVEPEDFATYYXQHSWEIPPTFGGGTKLEIKR

SEQ ID NO: 464 - protein, 113 aa, Artificial Sequence
  Synthesized sequence with two or more selenocysteine residues substituted for two or more cysteine residues
  VARIANT (1)...(113): Xaa = selenocysteine or cysteine
DIVMTQSPLSLSVTPGEPASISXRSSQSLLHTNGYNYLDWYVQKPGQSPQLLIYLASNRASGVPDRFSGSGSGTDFTLKISRVETEDVGVYYXMQALQIPRTFGQGTKVEIKR

SEQ ID NO: 465 - protein, 113 aa, Artificial Sequence
  Synthesized sequence with two or more selenocysteine residues substituted for two or more cysteine residues
  VARIANT (1)...(113): Xaa = selenocysteine or cysteine
DIVMTQSPDSLAVSLGERATINXKSSQSLLYSRNQKNYLAWYQQKPGQPPKLLIFWASTRESGVPDRFSGSGFGTDFTLTISSLQAEDVAVYYXQQYFSYPLTFGQGTKVEIK

SEQ ID NO: 466 - protein, 112 aa, Artificial Sequence
  Synthesized sequence with two or more selenocysteine residues substituted for two or more cysteine residues
  VARIANT (1)...(112): Xaa = selenocysteine or cysteine
DVVMTQSPPSLLVTLGQPASISXRSSQSLLHSSGNTYLNWLLQRPGQSPQPLIYLVSKLESGVPDRFSGSGSGTDFTLKISGVEAEDVGVYYXMQFTHYPYTFGQGTKLEIK

SEQ ID NO: 467 - protein, 114 aa, Artificial Sequence
  Synthesized sequence with two or more selenocysteine residues substituted for two or more cysteine residues
  VARIANT (1)...(114): Xaa = selenocysteine or cysteine
ELVMTQSPSSLTVTAGEKVTMSXKSSQSLLNSGNQKNYLTWYQQKPGQPPKLLIYWASTRESGVPDRFTGSGSGTDFTLTISSVQAEDLAVYYXQNDYSYPLTFGAGTKLEIKG

SEQ ID NO: 468 - protein, 108 aa, Artificial Sequence
  Synthesized sequence with two or more selenocysteine residues substituted for two or more cysteine residues
  VARIANT (1)...(108): Xaa = selenocysteine or cysteine
ETTVTQSPSFLSASVGDRVTITXITTTDIDDDMNWFQQEPGKAPKLLISEGNILRPGVPSRFSSSGYGTDFTLTISKLQPEDFATYYXLQSDNLPFTFGQGTKLEIKR

SEQ ID NO: 469 - protein, 107 aa, Artificial Sequence
  Synthesized sequence with two or more selenocysteine residues substituted for two or more cysteine residues
  VARIANT (1)...(107): Xaa = selenocysteine or cysteine
EIVMTQSPATLSVSPGERATLSXRASQSIGTNIHWYQQKPGQAPRLLIYYASESISGIPARFSGSGSGTEFTLTISSLQSEDFAVYYXQQSWSWPTTFGGGTKVEIK

SEQ ID NO: 470 - protein, 107 aa, Artificial Sequence
  Synthesized sequence with two or more selenocysteine residues substituted for two or more cysteine residues
  VARIANT (1)...(107): Xaa = selenocysteine or cysteine
AIQLTQSPSSLSASVGDRVTITXRASQDISSALVWYQQKPGKAPKLLIYDASSLESGVPSRFSGSESGTDFTLTISSLQPEDFATYYXQQFNSYPLTFGGGTKVEIK

SEQ ID NO: 471 - protein, 107 aa, Artificial Sequence
  Synthesized sequence with two or more selenocysteine residues substituted for two or more cysteine residues
  VARIANT (1)...(107): Xaa = selenocysteine or cysteine
DIQMTQSPSSVSASVGDRVTITXRASQDISSWLAWYQHKPGKAPKLLIYAASSLQSGVPSRFSGSGSGTDFTLTISSLQPEDFATYYXQQANSFPYTFGQGTKLEIK

SEQ ID NO: 472 - protein, 468 aa, Artificial Sequence
  Synthesized sequence with two or more selenocysteine residues substituted for two or more cysteine residues
  VARIANT (1)...(468): Xaa = selenocysteine or cysteine
MKHLWFFLLLVAAPRWVLSQVQLQESGPGLVKPSQTLSLTXTVSGGSISSGGYYWSWIRQHPGKGLEWIGIIYYSGSTYYNPSLKSRVTISVDTSKNQFSLKLNSVTAADTAVFYXARVAIVTTIPGGMDVWGQGTTVTVSSASTKGPSVFPLAPXSRSTSESTAALGXLVKDYFPEPVTVSWNSGALTSGVHTFPAVLQSSGLYSLSSVVTVPSSNFGTQTYTXNVDHKPSNTKVDKTVERKXXVEXPPXPAPPVAGPSVFLFPPKPKDTLMISRTPEVTXVVVDVSHEDPEVQFNWYVDGVEVHNAKTKPREEQFNSTFRVVSVLTVVHQDWLNGKEYKXKVSNKGLPAPIEKTISKTKGQPREPQVYTLPPSREEMTKNQVSLTXLVKGFYPSDIAVEWESNGQPENNYKTTPPMLDSDGSFFLYSKLTVDKSRWQQGNVFSXSVMHEALHNHYTQKSLSLSPGK

SEQ ID NO: 473 - protein, 441 aa, Artificial Sequence
  Synthesized sequence with two or more selenocysteine residues substituted for two or more cysteine residues
  VARIANT (1)...(441): Xaa = selenocysteine or cysteine
QVQLQQWGAGLLKPSETLSLTXAVYGGSFSPYYWSWIRQPPGKGLEWIGEINHSGSTNYNPSLKSRVTISVDTSKNQFSLKLSSVTAADTAVYYXARRAGDFDYWGQGTLVTVSSASTKGPSVFPLAPXSRSTSESTAALGXLVKDYFPEPVTVSWNSGALTSGVHTFPAVLQSSGLYSLSSVVTVPSSNFGTQTYTXNVDHKPSNTKVDKTVERKXXVEXPPXPAPPVAGPSVFLFPPKPKDTLMISRTPEVTXVVVDVSHEDPEVQFNWYVDGVEVHNAKTKPREEQFNSTFRVVSVLTVVHQDWLNGKEYKXKVSNKGLPAPIEKTISKTKGQPREPQVYTLPPSREEMTKNQVSLTXLVKGFYPSDIAVEWESNGQPENNYKTTPPMLDSDGSFFLYSKLTVDKSRWQQGNVFSXSVMHEALHNHYTQKSLSLSPGK

SEQ ID NO: 474 - protein, 469 aa, Artificial Sequence
  Synthesized sequence with two or more selenocysteine residues substituted for two or more cysteine residues
  VARIANT (1)...(469): Xaa = selenocysteine or cysteine
MEFGLTWVFLVALLRGVQXQVQLVESGGGVVQPGRSLRLSXAASGFTFSSYGMHWVRQAPGKGLEWVAVMSYDGSKKFYTDSVKGRFTISRDNSKNTLYLQMNSLRAEDTAVYYXARDGGDYVRYHYYGMDVWGQGTTVTVSSASTKGPSVFPLAPXSRSTSESTAALGXLVKDYFPEPVTVSWNSGALTSGVHTFPAVLQSSGLYSLSSVVTVPSSNFGTQTYTXNVDHKPSNTKVDKTVERKXXVEXPPXPAPPVAGPSVFLFPPKPKDTLMISRTPEVTXVVVDVSHEDPEVQFNWYVDGVEVHNAKTKPREEQFNSTFRVVSVLTVVHQDWLNGKEYKXKVSNKGLPAPIEKTISKTKGQPREPQVYTLPPSREEMTKNQVSLTXLVKGFYPSDIAVEWESNGQPENNYKTTPPMLDSDGSFFLYSKLTVDKSRWQQGNVFSXSVMHEALHNHYTQKSLSLSPGK

SEQ ID NO: 475 - protein, 446 aa, Artificial Sequence
  Synthesized sequence with two or more selenocysteine residues substituted for two or more cysteine residues
  VARIANT (1)...(446): Xaa = selenocysteine or cysteine
QVQLQQSGAEVKKPGASVKVSXKALGYTFTDYEMHWVKQTPVHGLEWIGAIHPGRGGTAYNQKFKGKATLTADKSTSTAYMELSSLTSEDTAVYYXTRITGYFDVWGQGTTVTVSSASTKGPSVFPLAPSSKSTSGGTAALGXLVKDYFPEPVTVSWNSGALTSGVHTFPAVLQSSGLYSLSSVVTVPSSSLGTQTYIXNVNHKPSNTKVDKKVEPKSXDKTHTXPPXPAPELLGGPSVFLFPPKPKDTLMISRTPEVTXVVVDVSHEDPEVKFNWYVDGVEVHNAKTKPREEQYNSTYRVVSVLTVLHQDWLNGKEYKXKVSNKALPAPIEKTISKAKGQPREPQVYTLPPSRDELTKNQVSLTXLVKGFYPSDIAVEWESNGQPENNYKTTPPVLDSDGSFFLYSKLTVDKSRWQQGNVFSXSVMHEALHNHYTQKSLSLSPGK

SEQ ID NO: 476 - protein, 228 aa, Artificial Sequence
  Synthesized sequence with two or more selenocysteine residues substituted for two or more cysteine residues
  VARIANT (1)...(228): Xaa = selenocysteine or cysteine
EVQLQQSGPELVKTGASVKISXKASGYSFTSYYMHWVKQSHGKSLEWIGEINPYNGGASYNQKIKGRATFTVDTSSRTAYMQFNSLTSEDSAVYYXARSIYGHSVLDYWGQGTSVSVSSAKTTPPSVYPLAPGSAAQTNSMVTLGXLVKGYFPEPVTVTWNSGSLSSGVHTFPAVLQSDLYTLSSSVTVPSSTWPSQTVTXNVAHPASSTKVDKKIVPRDXGXKPXIX

SEQ ID NO: 477 - protein, 447 aa, Artificial Sequence
  Synthesized sequence with two or more selenocysteine residues substituted for two or more cysteine residues
  VARIANT (1)...(447): Xaa = selenocysteine or cysteine
EVQLVESGGGLVQPGGSLRLSXAASGFTFSSFGMHWVRQAPGKGLEWVAYINGGSSTIFYANAVKGRFTISRDNAKNTLYLQMNSLRAEDTAVYYXARYASYGGGAMDYWGQGTLVTVSSASTKGPSVFPLAPXSRSTSESTAALGXLVKDYFPEPVTVSWNSGALTSGVHTFPAVLQSSGLYSLSSVVTVPSSSLGTKTYTXNVDHKPSNTKVDKRVESKYGPPXPPXPAPEFLGGPSVFLFPPKPKDTLMISRTPEVTXVVVDVSQEDPEVQFNWYVDGVEVHNAKTKPREEQFNSTYRVVSVLTVLHQDWLNGKEYKXKVSNKGLPSSIEKTISKAKGQPREPQVYTLPPSQEEMTKNQVSLTXLVKGFYPSDIAVEWESNGQPENNYKTTPPVLDSDGSFFLYSRLTVDKSRWQEGNVFSXSVMHEALHNHYTQKSLSLSLGK

SEQ ID NO: 478 - protein, 465 aa, Artificial Sequence
  Synthesized sequence with two or more selenocysteine residues substituted for two or more cysteine residues
  VARIANT (1)...(465): Xaa = selenocysteine or cysteine
MEFGLSWLFLVAILKGVQXEVQLLESGGGLVQPGGSLRLSXAASGFTFSSYAMSWVRQAPGKGLEWVSTISGSGGSTYYADSVKGRFTISRDNSKNTLYLQMNSLRAEDTAVYYXAKERYNWNYLHYWGQGTLVTVSSASTKGPSVFPLAPXSRSTSESTAALGXLVKDYFPEPVTVSWNSGALTSGVHTFPAVLQSSGLYSLSSVVTVPSSSLGTKTYTXNVDHKPSNTKVDKRVESKYGPPXPSXPAPEFLGGPSVFLFPPKPKDTLMISRTPEVTXVVVDVSQEDPEVQFNWYVDGVEVHNAKTKPREEQFNSTYRVVSVLTVLHQDWLNGKEYKXKVSNKGLPSSIEKTISKAKGQPREPQVYTLPPSQEEMTKNQVSLTXLVKGFYPSDIAVEWESNGQPENNYKTTPPVLDSDGSFFLYSRLTVDKSRWQEGNVFSXSVMHEALHNHYTQKSLSLSLGK

SEQ ID NO: 479 - protein, 446 aa, Artificial Sequence
  Synthesized sequence with two or more selenocysteine residues substituted for two or more cysteine residues
  VARIANT (1)...(446): Xaa = selenocysteine or cysteine
QVQLVESGGGVVQPGRSLRLSXAASGFTFSSYGMHWVRQAPGKGLEWVAVIWYDGSNQYYADSVKGRFTISRDNSKNTLFLQMHSLRAEDTAVYYXARGLTSGRYGMDVWGQGTTVTVSSASTKGPSVFPLAPXSRSTSESTAALGXLVKDYFPEPVTVSWNSGALTSGVHTFPAVLQSSGLYSLSSVVTVPSSNFGTQTYTXNVDHKPSNTKVDKTVERKXXVEXPPXPAPPVAGPSVFLFPPKPKDTLMISRTPEVTXVVVDVSHEDPEVQFNWYVDGVEVHNAKTKPREEQFNSTFRVVSVLTVVHQDWLNGKEYKXKVSNKGLPAPIEKTISKTKGQPREPQVYTLPPSREEMTKNQVSLTXLVKGFYPSDIAVEWESNGQPENNYKTTPPMLDSDGSFFLYSKLTVDKSRWQQGNVFSXSVMHEALHNHYTQKSLSLSPGK

SEQ ID NO: 480 - protein, 470 aa, Artificial Sequence
  Synthesized sequence with two or more selenocysteine residues substituted for two or more cysteine residues
  VARIANT (1)...(470): Xaa = selenocysteine or cysteine
MDTLXSTLLLLTIPSWVLSQVTLKESGPALVKPTQTLTLTXTFSGFSLRTSGMGVGWIRQPPGKALEWLAHIWWDDDKSYNPSLKSQLTISKDTSKNQVVLTMTNMDPVDTATYYXARRNYYYDDYFAYWGQGTLVTVSSASTKGPSVFPLAPSSKSTSGGTAALGXLVKDYFPEPVTVSWNSGALTSGVHTFPAVLQSSGLYSLSSVVTVPSSSLGTQTYIXNVNHKPSNTKVDKKVEPKSXDKTHTXPPXPAPELLGGPSVFLFPPKPKDTLMISRTPEVTXVVVDVSHEDPEVKFNWYVDGVEVHNAKTKPREEQYNSTYRVVSVLTVLHQDWLNGKEYKXKVSNKALPAPIEKTISKAKGQPREPQVYTLPPSRDELTKNQVSLTXLVKGFYPSDIAVEWESNGQPENNYKTTPPVLDSDGSFFLYSKLTVDKSRWQQGNVFSXSVMHEALHNHYTQKSLSLSPGK

SEQ ID NO: 481 - protein, 451 aa, Artificial Sequence
  Synthesized sequence with two or more selenocysteine residues substituted for two or more cysteine residues
  VARIANT (1)...(451): Xaa = selenocysteine or cysteine
EVQLVESGGGLVQPGGSLRLSXAASGFTFSRHWMSWVRQAPGKGLEWVSEINPDSRTINYAPSVKGRFTISRDNAKNSLYLQMNSLRAEDTAVYYXARRVRIHYYGAMDSWGQGTTVTVSSASTKGPSVFPLAPSSKSTSGGTAALGXLVKDYFPEPVTVSWNSGALTSGVHTFPAVLQSSGLYSLSSVVTVPSSSLGTQTYIXNVNHKPSNTKVDKRVEPKSXDKTHTXPPXPAPELLGGPSVFLFPPKPKDTLMISRTPEVTXVVVDVSHEDPEVKFNWYVDGVEVHNAKTKPREEQYNSTYRVVSVLTVLHQDWLNGKEYKXKVSNKALPAPIEKTISKAKGQPREPQVYTLPPSREEMTKNQVSLTXLVKGFYPSDIAVEWESNGQPENNYKTTPPVLDSDGSFFLYSKLTVDKSRWQQGNVFSXSVMHEALHNHYTQKSLSLSPGK

SEQ ID NO: 482 - protein, 442 aa, Artificial Sequence
  Synthesized sequence with two or more selenocysteine residues substituted for two or more cysteine residues
  VARIANT (1)...(442): Xaa = selenocysteine or cysteine
EVQLVESGGGLVQPGGSLRLSXAASGFTFSSYGMDWVRQAPGKGLEWVSSIRGSRGSTYYADSVKGRFTISRDNSKNTLYLQMNSLRAEDTAVYYXARLYRYWFDYWGQGTLVTVSSASTKGPSVFPLAPXSRSTSESTAALGXLVKDYFPEPVTVSWNSGALTSGVHTFPAVLQSSGLYSLSSVVTVPSSNFGTQTYTXNVDHKPSNTKVDKTVERKXXVEXPPXPAPPVAGPSVFLFPPKPKDTLMISRTPEVTXVVVDVSHEDPEVQFNWYVDGVEVHNAKTKPREEQFNSTFRVVSVLTVVHQDWLNGKEYKXKVSNKGLPAPIEKTISKTKGQPREPQVYTLPPSREEMTKNQVSLTXLVKGFYPSDIAVEWESNGQPENNYKTTPPMLDSDGSFFLYSKLTVDKSRWQQGNVFSXSVMHEALHNHYTQKSLSLSPG

SEQ ID NO: 483 - protein, 455 aa, Artificial Sequence
  Synthesized sequence with two or more selenocysteine residues substituted for two or more cysteine residues
  VARIANT (1)...(455): Xaa = selenocysteine or cysteine
QLQLQESGPGLVKPSETLSLTXTVSGGSISSSSYWGWIRQPPGKGLEWIGSIYYSGRNYNNPSLKSRVTISVDTSKNQFSLKLSSVTAADTAVYYXARHYYGSGSSYYYYDLDVWGQGTTVTVSSASTKGPSVFPLAPSSKSTSGGTAALGXLVKDYFPEPVTVSWNSGALTSGVHTFPAVLQSSGLYSLSSVVTVPSSSLGTQTYIXNVNHKPSNTKVDKKVEPKSXDKTHTXPPXPAPELLGGPDVFLFPPKPKDTLMISRTPEVTXVVVDVSHEDPEVKFNWYVDGVEVHNAKTKPREEQYNSTYRVVSVLTVLHQDWLNGKEYKXKVSNKALPLPEEKTISKAKGQPREPQVYTLPPSREEMTKNQVSLTXLVKGFYPSDIAVEWESNGQPENNYKTTPPVLDSDGSFFLYSKLTVDKSRWQQGNVFSXSVMHEALHNHYTQKSLSLSPGK

SEQ ID NO: 484 - protein, 447 aa, Artificial Sequence
  Synthesized sequence with two or more selenocysteine residues substituted for two or more cysteine residues
  VARIANT (1)...(447): Xaa = selenocysteine or cysteine
EVQLQQSGPELVKPGASVKISXKASGYSFIGYFMNWVMQSHGRSLEWIGRINPYNGYTFYNQKFKGKATLTVDKSSSTAHMELRSLASEDSAVYYXARHFRYDGVFYYAMDYWGQGTSVTVSSAKTTPPSVYPLAPGSAAQTNSMVTLGXLVKGYFPEPVTVTWNSGSLSSGVHTFPAVLQSDLYTLSSSVTVPSSTWPSETVTXNVAHPASSTKVDKKIVPRDXGXKPXIXTVPEVSSVFIFPPKPKDVLTITLTPKVTXVVVDISKDDPEVQFSWFVDDVEVHTAQTQPREEQFNSTFRSVSELPIMHQDWLNGKEFKXRVNSAAFPAPIEKTISKTKGRPKAPQVYTIPPPKEQMAKDKVSLTXMITDFFPEDITVEWQWNGQPAENYKNTQPIMDTDGSYFVYSKLNVQKSNWEAGNTFTXSVLHEGLHNHHTEKSLSHSPGK

SEQ ID NO: 485 - protein, 452 aa, Artificial Sequence
  Synthesized sequence with two or more selenocysteine residues substituted for two or more cysteine residues
  VARIANT (1)...(452): Xaa = selenocysteine or cysteine
EVHLVESGGGLVQPGGALRLSXAASGFTFSNYDMHWVRQATGKGLEWVSANGTAGDTYYPGSVKGRFTISRENAKNSLYLQMNSLRAGDTAVYYXARDVDIVATITDYFDYWGQGTLVTVSSASTKGPSVFPLAPSSKSTSGGTAALGXLVKDYFPEPVTVSWNSGALTSGVHTFPAVLQSSGLYSLSSVVTVPSSSLGTQTYIXNVNHKPSNTKVDKRVEPKSXDKTHTXPPXPAPELLGGPSVFLFPPKPKDTLMISRTPEVTXVVVDVSHEDPEVKFNWYVDGVEVHNAKTKPREEQYNSTYRVVSVLTVLHQDWLNGKEYKXKVSNKALPAPIEKTISKAKGQPREPQVYTLPPSREEMTKNQVSLTXLVKGFYPSDIAVEWESNGQPENNYKTTPPVLDSDGSFFLYSKLTVDKSRWQQGNVFSXSVMHEALHNHYTQKSLSLSPGK

SEQ ID NO: 486 - protein, 453 aa, Artificial Sequence
  Synthesized sequence with two or more selenocysteine residues substituted for two or more cysteine residues
  VARIANT (1)...(453): Xaa = selenocysteine or cysteine
QVQLVQSGAEVKKPGASVKVSXKASGYTFTSYDINWVRQATGQGLEWMGWMNPNSGNTGYAQKFQGRVTMTRNTSISTAYMELSSLRSEDTAVYYXARGGYSSSWYYWYFDLWGRGTLVTVSSASTKGPSVFPLAPSSKSTSGGTAALGXLVKDYFPEPVTVSWNSGALTSGVHTFPAVLQSSGLYSLSSVVTVPSSSLGTQTYIXNVNHKPSNTKVDKRVEPKSXDKTHTXPPXPAPELLGGPSVFLFPPKPKDTLMISRTPEVTXVVVDVSHEDPEVKFNWYVDGVEVHNAKTKPREEQYNSTYRVVSVLTVLHQDWLNGKEYKXKVSNKALPAPIEKTISKAKGQPREPQVYTLPPSREEMTKNQVSLTXLVKGFYPSDIAVEWESNGQPENNYKTTPPVLDSDGSFFLYSKLTVDKSRWQQGNVFSXSVMHEALHNHYTQKSLSLSPGK

SEQ ID NO: 487 - protein, 222 aa, Artificial Sequence
  Synthesized sequence with two or more selenocysteine residues substituted for two or more cysteine residues
  VARIANT (1)...(222): Xaa = selenocysteine or cysteine
EVQLQQSGPELMKPGASVKISXKATGYTFSTSWIEWIKQRPGHGLEWIGEVLPGSGKSNHNANFKGRATFTADTASNTAYMQLSSLTSEDSAVYYXAREGSNNNALAYWGQGTLVTVSAASTKGPSVFPLAPSSKSTSGGTAALGXLVKDYFPEPVTVSWNSGALTSGVHTFPAVLQSSGLYSLSSVVTVPSSSLGTQTYIXNVNHKPSNTKVDKKVEPKSX

SEQ ID NO: 488 - protein, 229 aa, Artificial Sequence
  Synthesized sequence with two or more selenocysteine residues substituted for two or more cysteine residues
  VARIANT (1)...(229): Xaa = selenocysteine or cysteine
QVQLVESGGGLVQPGGSLRLSXAASGFTFNSYWINWVRQAPGKGLEWVSGIAYDSSNTLYADSVKGRFTISRDNSKNTLYLQMNSLRAEDTAVYYXARGLGAFHWDMQPDYWGQGTLVTVSSASTKGPSVFPLAPSSKSTSGGTAALGXLVKDYFPEPVTVSWNSGALTSGVHTFPAVLQSSGLYSLSSVVTVPSSSLGTQTYIXNVNHKPSNTKVDKKVEPKSXDKTH

SEQ ID NO: 489 - protein, 471 aa, Artificial Sequence
  Synthesized sequence with two or more selenocysteine residues substituted for two or more cysteine residues
  VARIANT (1)...(471): Xaa = selenocysteine or cysteine
MDWTWRILFLVAAATGAHSQVQLVQSGAEVKKPGASVKVSXKASGYTFTGYYMHWVRQAPGQGLEWMGWINPDSGGTNYAQKFQGRVTMTRDTSISTAYMELNRLRSDDTAVYYXARDQPLGYXTNGVXSYFDYWGQGTLVTVSSASTKGPSVFPLAPXSRSTSESTAALGXLVKDYFPEPVTVSWNSGALTSGVHTFPAVLQSSGLYSLSSVVTVPSSNFGTQTYTXNVDHKPSNTKVDKTVERKXXVEXPPXPAPPVAGPSVFLFPPKPKDTLMISRTPEVTXVVVDVSHEDPEVQFNWYVDGVEVHNAKTKPREEQFNSTFRVVSVLTVVHQDWLNGKEYKXKVSNKGLPAPIEKTISKTKGQPREPQVYTLPPSREEMTKNQVSLTXLVKGFYPSDIAVEWESNGQPENNYKTTPPMLDSDGSFFLYSKLTVDKSRWQQGNVFSXSVMHEALHNHYTQKSLSLSPGK

SEQ ID NO: 490 - protein, 222 aa, Artificial Sequence
  Synthesized sequence with two or more selenocysteine residues substituted for two or more cysteine residues
  VARIANT (1)...(222): Xaa = selenocysteine or cysteine
EVQLLESGGGLVQPGGSLRLSXAASGFTFPWYRVHWVRQAPGKGLEWVSSIRSSGGFPYYNYKVKGRFTISRDNSKNTLYLQMNSLRAEDTAVYYXARFYDSFFDIWGQGTMVTVSSASTKGPSVFPLAPXSRSTSESTAALGXLVKDYFPEPVTVSWNSGALTSGVHTFPAVLQSSGLYSLSSVVTVPSSSLGTKTYTXNVDHKPSNTKVDKRVESKYGPP

SEQ ID NO: 491 - protein, 444 aa, Artificial Sequence
  Synthesized sequence with two or more selenocysteine residues substituted for two or more cysteine residues
  VARIANT (1)...(444): Xaa = selenocysteine or cysteine
QVELVQSGAEVKKPGSSVKVSXKASGGTFSAIHWVRQAPGQGLEWMGGIIPIFGMADYAQKFQGRVTITADESTSTAYMELSSLRSEDTAVYYXARTDYGFRALDYWGQGTLVTVSSASTKGPSVFPLAPXSRSTSESTAALGXLVKDYFPEPVTVSWNSGALTSGVHTFPAVLQSSGLYSLSSVVTVPSSSLGTKTYTXNVDHKPSNTKVDKRVESKYGPPXPSXPAPEFLGGPSVFLFPPKPKDTLMISRTPEVTXVVVDVSQEDPEVQFNWYVDGVEVHNAKTKPREEQFNSTYRVVSVLTVLHQDWLNGKEYKXKVSNKGLPSSIEKTISKAKGQPREPQVYTLPPSQEEMTKNQVSLTXLVKGFYPSDIAVEWESNGQPENNYKTTPPVLDSDGSFFLYSRLTVDKSRWQEGNVFSXSVMHEALHNHYTQKSLSLSLGK

SEQ ID NO: 492 - protein, 452 aa, Artificial Sequence
  Synthesized sequence with two or more selenocysteine residues substituted for two or more cysteine residues
  VARIANT (1)...(452): Xaa = selenocysteine or cysteine
EVQLVESGAEVKKPGASVKVSXKASGYSFSGYTMNWVRQAPGQRLEWMGLINPYNGGTSYNQNFKGRVTLTVDTSASTAYLELNSLRSEDTGVYYXAREDYDGYLYFAMDYWGQGTLVTVSSASTKGPSVFPLAPSSKSTSGGTAALGXLVKDYFPEPVTVSWNSGALTSGVHTFPAVLQSSGLYSLSSVVTVPSSSLGTQTYIXNVNHKPSNTKVDKKVEPKSXDKTHTXPPXPAPELLGGPSVFLFPPKPKDTLMISRTPEVTXVVVDVSHEDPEVKFNWYVDGVEVHNAKTKPREEQYNSTYRVVSVLTVLHQDWLNGKEYKXKVSNKALPAPIEKTISKAKGQPREPQVYTLPPSRDELTKNQVSLTXLVKGFYPSDIAVEWESNGQPENNYKTTPPVLDSDGSFFLYSKLTVDKSRWQQGNVFSXSVMHEALHNHYTQKSLSLSPGK

SEQ ID NO: 493 - protein, 223 aa, Artificial Sequence
  Synthesized sequence with two or more selenocysteine residues substituted for two or more cysteine residues
  VARIANT (1)...(223): Xaa = selenocysteine or cysteine
EVQLQQPGAELVQPGTSVRLSXKASGYIFTTYWIHWVKQRPGQGLEWIGEINPNNGRINYNEKFKTKATLTVDKSSSTAYMQLSSLTSEDSAVYYXTRVGVMITTFPYWGQGTLVTVSAASTKGPSVFPLAPXSRSTSESTAALGXLVKDYFPEPVTVSWNSGALTSGVHTFPAVLQSSGLYSLSSVVTVPSSSLGTKTYTXNVDHKPSNTKVDKRVHHHHHH

SEQ ID NO: 494 - protein, 444 aa, Artificial Sequence
  Synthesized sequence with two or more selenocysteine residues substituted for two or more cysteine residues
  VARIANT (1)...(444): Xaa = selenocysteine or cysteine
QVQLLESGAVLARPGTSVKISXKASGFNIKDYYMHWVKQRPGQGLEWIGGNDPANGHSMYDPKFQGRVTITADTSTSTVFMELSSLRSEDTAVYYXARDSGYAMDYWGQGTLVTVSSASTKGPSVFPLAPXSRSTSESTAALGXLVKDYFPEPVTVSWNSGALTSGVHTFPAVLQSSGLYSLSSVVTVPSSSLGTKTYTXNVDHKPSNTKVDKRVESKYGPPXPPXPAPEFLGGPSVFLFPPKPKDTLMISRTPEVTXVVVDVSQEDPEVQFNWYVDGVEVHNAKTKPREEQFNSTYRVVSVLTVLHQDWLNGKEYKXKVSNKGLPSSIEKTISKAKGQPREPQVYTLPPSQEEMTKNQVSLTXLVKGFYPSDIAVEWESNGQPENNYKTTPPVLDSDGSFFLYSRLTVDKSRWQEGNVFSXSVMHEALHNHYTQKSLSLSLGK

SEQ ID NO: 495 - protein, 443 aa, Artificial Sequence
  Synthesized sequence with two or more selenocysteine residues substituted for two or more cysteine residues
  VARIANT (1)...(443): Xaa = selenocysteine or cysteine
EVQLVQSGAEVEKPGASVKISXKASGSSFTGYNMNWVRQNIGKSLEWIGAIDPYYGGTSYNQKFKGRATLTVDKSTSTAYMHLKSLRSEDTAVYYXVSGMEYWGQGTSVTVSSASTKGPSVFPLAPSSKSTSGGTAALGXLVKDYFPEPVTVSWNSGALTSGVHTFPAVLQSSGLYSLSSVVTVPSSSLGTQTYIXNVNHKPSNTKVDKRVEPKSXDKTHTXPPXPAPELLGGPSVFLFPPKPKDTLMISRTPEVTXVVVDVSHEDPEVKFNWYVDGVEVHNAKTKPREEQYNSTYRVVSVLTVLHQDWLNGKEYKXAVSNKALPAPIEKTISKAKGQPREPQVYTLPPSREEMTKNQVSLTXLVKGFYPSDIAVEWESNGQPENNYKTTPPVLDSDGSFFLYSKLTVDKSRWQQGNVFSXSVMHEALHNHYTQKSLSLSPGK

SEQ ID NO: 496 - protein, 455 aa, Artificial Sequence
  Synthesized sequence with two or more selenocysteine residues substituted for two or more cysteine residues
  VARIANT (1)...(455): Xaa = selenocysteine or cysteine
QVQLVQSGAEVKKPGSSVRVSXKASGFYIKDTYMHWVIQAPGQGLEWMGTIDPANGNTKYVPKFQGRVTITADTSTSTAYMRLSSLRSEDTAVYYXARSIYDDYHYDDYYAMDYWGQGTLVTVSSASTKGPSVFPLAPSSKSTSGGTAALGXLVKDYFPEPVTVSWNSGALTSGVHTFPAVLQSSGLYSLSSVVTVPSSSLGTQTYIXNVNHKPSNTKVDKKVEPKSXDKTHTXPPXPAPELLGGPSVFLFPPKPKDTLMISRTPEVTXVVVDVSHEDPEVKFNWYVDGVEVHNAKTKPREEQYNSTYRVVSVLTVLHQDWLNGKEYKXKVSNKALPAPIEKTISKAKGQPREPQVYTLPPSRDELTKNQVSLTXLVKGFYPSDIAVEWESNGQPENNYKTTPPVLDSDGSFFLYSKLTVDKSRWQQGNVFSXSVMHEALHNHYTQKSLSLSPGK

SEQ ID NO: 497 - protein, 448 aa, Artificial Sequence
  Synthesized sequence with two or more selenocysteine residues substituted for two or more cysteine residues
  VARIANT (1)...(448): Xaa = selenocysteine or cysteine
QIQLVQSGPELKKPGETVKISXKASGYTFTNYGMNWVKQAPGKGLKWMGWIHTYTGKPTHADDFKGRFAFSLETSASTAYLQISNLKNEDMATYFXARGSLSTAMDYWGQGTTVTVSSASTKGPSVFPLAPSSKSTSGGTAALGXLVKDYFPEPVTVSWNSGALTSGVHTFPAVLQSSGLYSLSSVVTVPSSSLGTQTYIXNVNHKPSNTKVDKKVEPKSXDKTHTXPPXPAPELLGGPSVFLFPPKPKDTLMISRTPEVTXVVVDVSHEDPEVKFNWYVDGVEVHNAKTKPREEQYNSTYRVVSVLTVLHQDWLNGKEYKXKVSNKALPAPIEKTISKAKGQPREPQVYTLPPSREEMTKNQVSLTXLVKGFYPSDIAVEWESNGQPENNYKTTPPVLDSDGSFFLYSKLTVDKSRWQQGNVFSXSVMHEALHNHYTQKSLSLSPGK

SEQ ID NO: 498 - protein, 450 aa, Artificial Sequence
  Synthesized sequence with two or more selenocysteine residues substituted for two or more cysteine residues
  VARIANT (1)...(450): Xaa = selenocysteine or cysteine
EVQLVESGGGLVQPGGSLRLSXAASGFNIKDTYIHWVRQAPGKGLEWIGRIDPANDNIKYDPKFQGRFTISADNAKNSAYLQMNSLRAEDTAVYYXARSEENWYDFFDYWGQGTLVTVSSASTKGPSVFPLAPSSKSTSGGTAALGXLVKDYFPEPVTVSWNSGALTSGVHTFPAVLQSSGLYSLSSVVTVPSSSLGTQTYIXNVNHKPSNTKVDKKVEPKSXDKTHTXPPXPAPEALGAPSVFLFPPKPKDTLMISRTPEVTXVVVDVSHEDPEVKFNWYVDGVEVHNAKTKPREEQYNSTYRVVSVLTVLHQDWLNGKEYKXKVSNKALPAPIEKTISKAKGQPREPQVYTLPPSREEMTKNQVSLTXLVKGFYPSDIAVEWESNGQPENNYKTTPPVLDSDGSFFLYSKLTVDKSRWQQGNVFSXSVMHEALHNHYTQKSLSLSPGK

SEQ ID NO: 499 - protein, 453 aa, Artificial Sequence
  Synthesized sequence with two or more selenocysteine residues substituted for two or more cysteine residues
  VARIANT (1)...(453): Xaa = selenocysteine or cysteine
QVQLQQSGPGLVKPSQTLSLTXAISGDSVSGNSATWNWIRQSPSRGLEWLGRTYYRSKWNHDYAESVKSRITINPDTSKNQFSLQLNSVTPEDTAVYYXARGDSSSWYAFDYWGQGTLVTVSSASTKGPSVFPLAPSSKSTSGGTAALGXLVKDYFPEPVTVSWNSGALTSGVHTFPAVLQSSGLYSLSSVVTVPSSSLGTQTYIXNVNHKPSNTKVDKRVEPKSXDKTHTXPPXPAPELLGGPSVFLFPPKPKDTLMISRTPEVTXVVVDVSHEDPEVKFNWYVDGVEVHNAKTKPREEQYNSTYRVVSVLTVLHQDWLNGKEYKXKVSNKALPAPIEKTISKAKGQPREPQVYTLPPSREEMTKNQVSLTXLVKGFYPSDIAVEWESNGQPENNYKTTPPVLDSDGSFFLYSKLTVDKSRWQQGNVFSXSVMHEALHNHYTQKSLSLSPGK

SEQ ID NO: 500 - protein, 449 aa, Artificial Sequence
  Synthesized sequence with two or more selenocysteine residues substituted for two or more cysteine residues
  VARIANT (1)...(449): Xaa = selenocysteine or cysteine
EVQLVQSGAEVKKPGASVKVSXKASGYTFTSYYMHWVRQAPGQGLEWMGIINPSGGSTSYAQKFQGRVTMTRDTSTSTVYMELSSLRSEDTAVYYXARGVGAHDAFDIWGQGTTVTVSSASTKGPSVFPLAPSSKSTSGGTAALGXLVKDYFPEPVTVSWNSGALTSGVHTFPAVLQSSGLYSLSSVVTVPSSSLGTQTYIXNVNHKPSNTKVDKRVEPKSXDKTHTXPPXPAPELLGGPSVFLFPPKPKDTLMISRTPEVTXVVVDVSHEDPEVKFNWYVDGVEVHNAKTKPREEQYNSTYRVVSVLTVLHQDWLNGKEYKXKVSNKALPAPIEKTISKAKGQPREPQVYTLPPSREEMTKNQVSLTXLVKGFYPSDIAVEWESNGQPENNYKTTPPVLDSDGSFFLYSKLTVDKSRWQQGNVFSXSVMHEALHNHYTQKSLSLSPGK

SEQ ID NO: 501 - protein, 449 aa, Artificial Sequence
  Synthesized sequence with two or more selenocysteine residues substituted for two or more cysteine residues
  VARIANT (1)...(449): Xaa = selenocysteine or cysteine
EVQLVESGGGVVQPGRSLRLSXSASGFDFTTYWMSWVRQAPGKGLEWIGEIHPDSSTINYAPSLKDRFTISRDNAKNTLFLQMDSLRPEDTGVYFXASLYFGFPWFAYWGQGTPVTVSSASTKGPSVFPLAPSSKSTSGGTAALGXLVKDYFPEPVTVSWNSGALTSGVHTFPAVLQSSGLYSLSSVVTVPSSSLGTQTYIXNVNHKPSNTKVDKRVEPKSXDKTHTXPPXPAPELLGGPSVFLFPPKPKDTLMISRTPEVTXVVVDVSHEDPEVKFNWYVDGVEVHNAKTKPREEQYNSTYRVVSVLTVLHQDWLNGKEYKXKVSNKALPAPIEKTISKAKGQPREPQVYTLPPSREEMTKNQVSLTXLVKGFYPSDIAVEWESNGQPENNYKTTPPVLDSDGSFFLYSKLTVDKSRWQQGNVFSXSVMHEALHNHYTQKSLSLSPGK

SEQ ID NO: 502 - protein, 456 aa, Artificial Sequence
  Synthesized sequence with two or more selenocysteine residues substituted for two or more cysteine residues
  VARIANT (1)...(456): Xaa = selenocysteine or cysteine
QVQLVESGGGVVQPGRSLRLSXTASGFTFKNYAMHWVRQAPAKGLEWVATISYDGRNIQYADSVKGRFTFSRDNSQDTLYLQLNSLRPEDTAVYYXARPVRSRWLQLGLEDAFHIWGQGTMVTVSSASTKGPSVFPLAPSSKSTSGGTAALGXLVKDYFPEPVTVSWNSGALTSGVHTFPAVLQSSGLYSLSSVVTVPSSSLGTQTYIXNVNHKPSNTKVDKKVEPKSXDKTHTXPPXPAPELLGGPSVFLFPPKPKDTLMISRTPEVTXVVVDVSHEDPEVKFNWYVDGVEVHNAKTKPREEQYNSTYRVVSVLTVLHQDWLNGKEYKXKVSNKALPAPIEKTISKAKGQPREPQVYTLPPSRDELTKNQVSLTXLVKGFYPSDIAVEWESNGQPENNYKTTPPVLDSDGSFFLYSKLTVDKSRWQQGNVFSXSVMHEALHNHYTQKSLSLSPGK

SEQ ID NO: 503 - protein, 443 aa, Artificial Sequence
  Synthesized sequence with two or more selenocysteine residues substituted for two or more cysteine residues
  VARIANT (1)...(443): Xaa = selenocysteine or cysteine
QVQLVQSGAEVKKPGSSVKVSXKASGYTFLIYPISWVRQAPGQGLEWMGNFHPYLGVTNYVEKFKGRVTITADKSTSTAYMELSSLRSEDTAVYYXARGGTGSFDYWGQGTTVTVSSASTKGPSVFPLAPXSRSTSESTAALGXLVKDYFPEPVTVSWNSGALTSGVHTFPAVLQSSGLYSLSSVVTVPSSSLGTKTYTXNVDHKPSNTKVDKRVESKYGPPXPPXPAPEFLGGPSVFLFPPKPKDTLMISRTPEVTXVVVDVSQEDPEVQFNWYVDGVEVHNAKTKPREEQFNSTYRVVSVLTVLHQDWLNGKEYKXKVSNKGLPSSIEKTISKAKGQPREPQVYTLPPSQEEMTKNQVSLTXLVKGFYPSDIAVEWESNGQPENNYKTTPPVLDSDGSFFLYSRLTVDKSRWQEGNVFSXSVMHEALHNHYTQKSLSLSLG

SEQ ID NO: 504 - protein, 440 aa, Artificial Sequence
  Synthesized sequence with two or more selenocysteine residues substituted for two or more cysteine residues
  VARIANT (1)...(440): Xaa = selenocysteine or cysteine
QVQLVQSGAEVKKPGSSVKVSXKASGYAFTSFLIEWVRQAPGQGLEWMGTSNPRTGGRKYKEKFRGRVTITADKSTSTAYMELSSLRSEDTAVYYXAREFFDYWGQGTTVTVSSASTKGPSVFPLAPXSRSTSESTAALGXLVKDYFPEPVTVSWNSGALTSGVHTFPAVLQSSGLYSLSSVVTVPSSSLGTKTYTXNVDHKPSNTKVDKRVESKYGPPXPPXPAPEAAGGPSVFLFPPKPKDTLMISRTPEVTXVVVDVSQEDPEVQFNWYVDGVEVHNAKTKPREEQFNSTYRVVSVLTVLHQDWLNGKEYKXKVSNKGLPSSIEKTISKAKGQPREPQVYTLPPSQEEMTKNQVSLTXLVKGFYPSDIAVEWESNGQPENNYKTTPPVLDSDGSFFLYSRLTVDKSRWQEGNVFSXSVMHEALHNHYTQKSLSLSLG

SEQ ID NO: 505 - protein, 451 aa, Artificial Sequence
  Synthesized sequence with two or more selenocysteine residues substituted for two or more cysteine residues
  VARIANT (1)...(451): Xaa = selenocysteine or cysteine
EVQLVESGGGLVKPGGSLRLSXAASGFPFSKLGMVWVRQAPGKGLEWVSTISSGGGYTYYPDSVKGRFTISRDNAKNSLYLQMNSLRAEDTAVYYXAREGISFQGGTYTYVMDYWGQGTLVTVSSASTKGPSVFPLAPXSRSTSESTAALGXLVKDYFPEPVTVSWNSGALTSGVHTFPAVLQSSGLYSLSSVVTVPSSSLGTKTYTXNVDHKPSNTKVDKRVESKYGPPXPPXPAPEAAGGPSVFLFPPKPKDTLMISRTPEVTXVVVDVSQEDPEVQFNWYVDGVEVHNAKTKPREEQFNSTYRVVSVLTVLHQDWLNGKEYKXKVSNKGLPSSIEKTISKAKGQPREPQVYTLPPSQEEMTKNQVSLTXLVKGFYPSDIAVEWESNGQPENNYKTTPPVLDSDGSFFLYSRLTVDKSRWQEGNVFSXSVMHEALHNHYTQKSLSLSLG

SEQ ID NO: 506 - protein, 451 aa, Artificial Sequence
  Synthesized sequence with two or more selenocysteine residues substituted for two or more cysteine residues
  VARIANT (1)...(451): Xaa = selenocysteine or cysteine
QLQVQESGPGLVKPSETLSLTXTVSGGSISNSYFSWGWIRQPPGKGLEWIGSFYYGEKTYYNPSLKSRATISIDTSKSQFSLKLSSVTAADTAVYYXPRGPTMIRGVIDSWGQGTLVTVSSASTKGPSVFPLAPSSKSTSGGTAALGXLVKDYFPEPVTVSWNSGALTSGVHTFPAVLQSSGLYSLSSVVTVPSSSLGTQTYIXNVNHKPSNTKVDKRVEPKSXDKTHTXPPXPAPELLGGPSVFLFPPKPKDTLMISRTPEVTXVVVDVSHEDPEVKFNWYVDGVEVHNAKTKPREEQYNSTYRVVSVLTVLHQDWLNGKEYKXKVSNKALPAPIEKTISKAKGQPREPQVYTLPPSREEMTKNQVSLTXLVKGFYPSDIAVEWESNGQPENNYKTTPPVLDSDGSFFLYSKLTVDKSRWQQGNVFSXSVMHEALHNHYTQKSLSLSPGK

SEQ ID NO: 507 - protein, 456 aa, Artificial Sequence
  Synthesized sequence with two or more selenocysteine residues substituted for two or more cysteine residues
  VARIANT (1)...(456): Xaa = selenocysteine or cysteine
EVQLVQSGAEVKKPGASVKVSXKASGYMFTSYGISWVRQAPGQGLEWMGWVSTYNGDTNYAQKFQGRVTVTTDTSTSTAYMELRSLRSEDTAVYYXARVLGYYDSIDGYYYGMDVWGQGTTVTVSSASTKGPSVFPLAPSSKSTSGGTAALGXLVKDYFPEPVTVSWNSGALTSGVHTFPAVLQSSGLYSLSSVVTVPSSSLGTQTYIXNVNHKPSNTKVDKRVEPKSXDKTHTXPPXPAPELLGGPSVFLFPPKPKDTLMISRTPEVTXVVVDVSHEDPEVKFNWYVDGVEVHNAKTKPREEQYNSTYRVVSVLTVLHQDWLNGKEYKXKVSNKALPAPIEKTISKAKGQPREPQVYTLPPSREEMTKNQVSLTXLVKGFYPSDIAVEWESNGQPENNYKTTPPVLDSDGSFFLYSKLTVDKSRWQQGNVFSXSVMHEALHNHYTQKSLSLSPGK

SEQ ID NO: 508 - protein, 447 aa, Artificial Sequence
  Synthesized sequence with two or more selenocysteine residues substituted for two or more cysteine residues
  VARIANT (1)...(447): Xaa = selenocysteine or cysteine
QVQLVQSGAEVKKPGASVKVSXKASGYSFTDYNMVWVRQAPGQGLEWMGYIDPYNGGTGYNQKFEGRVTMTTDTSTSTAYMELRSLRSDDTAVYYXARTRDRYDVWYFDVWGQGTLVTVSSASTKGPSVFPLAPXSRSTSESTAALGXLVKDYFPEPVTVSWNSGALTSGVHTFPAVLQSSGLYSLSSVVTVPSSSLGTKTYTXNVDHKPSNTKVDKRVESKYGPPXPPXPAPEAAGGPSVFLFPPKPKDTLMISRTPEVTXVVVDVSQEDPEVQFNWYVDGVEVHNAKTKPREEQFNSTYRVVSVLTVLHQDWLNGKEYKXKVSNKGLPSSIEKTISKAKGQPREPQVYTLPPSQEEMTKNQVSLTXLVKGFYPSDIAVEWESNGQPENNYKTTPPVLDSDGSFFLYSRLTVDKSRWQEGNVFSXSVMHEALHNHYTQKSLSLSLG

SEQ ID NO: 509 - protein, 443 aa, Artificial Sequence
  Synthesized sequence with two or more selenocysteine residues substituted for two or more cysteine residues
  VARIANT (1)...(443): Xaa = selenocysteine or cysteine
QVQLVQSGAEVKKPGASVKVSXKASGYTFTDYWMHWVRQAPGQGLEWMGLIDTSDVYTIYNQKFKGRVTMTRDTSTSTVYMELSSLRSEDTAVYYXARYGPLAMDYWGQGTLVTVSSASTKGPSVFPLAPXSRSTSESTAALGXLVKDYFPEPVTVSWNSGALTSGVHTFPAVLQSSGLYSLSSVVTVPSSSLGTKTYTXNVDHKPSNTKVDKRVESKYGPPXPPXPAPEAAGGPSVFLFPPKPKDTLMISRTPEVTXVVVDVSQEDPEVQFNWYVDGVEVHNAKTKPREEQFNSTYRVVSVLTVLHQDWLNGKEYKXKVSNKGLPSSIEKTISKAKGQPREPQVYTLPPSQEEMTKNQVSLTXLVKGFYPSDIAVEWESNGQPENNYKTTPPVLDSDGSFFLYSRLTVDKSRWQEGNVFSXSVMHEALHNHYTQKSLSLSLG

SEQ ID NO: 510 - protein, 471 aa, Artificial Sequence
  Synthesized sequence with two or more selenocysteine residues substituted for two or more cysteine residues
  VARIANT (1)...(471): Xaa = selenocysteine or cysteine
MEFGLSWVFLVALLRGVQXQVQLVESGGGVVQPGRSLRLSXTASGFTFSMFGVHWVRQAPGKGLEWVAAVSYDGSNKYYAESVKGRFTISRDNSKNILFLQMDSLRLEDTAVYYXARGRPKVVIPAPLAHWGQGTLVTFSSASTKGPSVFPLAPSSKSTSGGTAALGXLVKDYFPEPVTVSWNSGALTSGVHTFPAVLQSSGLYSLSSVVTVPSSSLGTQTYIXNVNHKPSNTKVDKRVEPKSXDKTHTXPPXPAPELLGGPSVFLFPPKPKDTLMISRTPEVTXVVVDVSHEDPEVKFNWYVDGVEVHNAKTKPREEQYNSTYRVVSVLTVLHQDWLNGKEYKXKVSNKALPAPIEKTISKAKGQPREPQVYTLPPSREEMTKNQVSLTXLVKGFYPSDIAVEWESNGQPENNYKTTPPVLDSDGSFFLYSKLTVDKSRWQQGNVFSXSVMHEALHNHYTQKSLSLSPGK

SEQ ID NO: 511 - protein, 448 aa, Artificial Sequence
  Synthesized sequence with two or more selenocysteine residues substituted for two or more cysteine residues
  VARIANT (1)...(448): Xaa = selenocysteine or cysteine
EVQLVESGGGLVQPGGSLRLSXAASGFTISSNYMIWVRQAPGKGLEWVSDLYYYAGDTYYADSVKGRFTMSRDISKNTVYLQMNSLRAEDTAVYYXARWADDHPPWIDLWGRGTLVTVSSASTKGPSVFPLAPSSKSTSGGTAALGXLVKDYFPEPVTVSWNSGALTSGVHTFPAVLQSSGLYSLSSWTVPSSSLGTQTYIXNVNHKPSNTKVDKKVEPKSXDKTHTXPPXPAPELLGGPSVFLFPPKPKDTLMISRTPEVTXVVVDVSHEDPEVKFNWYVDGVEVHNAKTKPREEQYNSTYRWSVLTVLHQDWLNGKEYKXKVSNKALPAPIEKTISKAKGQPREPQVYTLPPSRDELTKNQVSLTXLVKGFYPSDIAVEWESNGQPENNYKTTPPVLDSDGSFFLYSKLTVDKSRWQQGNVFSXSVMHEALHNHYTQKSLSLSPGK

SEQ ID NO: 512 - protein, 451 aa, Artificial Sequence
  Synthesized sequence with two or more selenocysteine residues substituted for two or more cysteine residues
  VARIANT (1)...(451): Xaa = selenocysteine or cysteine
EVQLVESGGGLVKPGGSLKLSXAASGYTFTSYVMHWVRQAPGKGLEWIGYINPYNDGTKYNEKFQGRVTISSDKSISTAYMELSSLRSEDTAMYYXARGTYYYGTRVFDYWGQGTLVTVSSASTKGPSVFPLAPSSKSTSGGTAALGXLVKDYFPEPVTVSWNSGALTSGVHTFPAVLQSSGLYSLSSVVTVPSSSLGTQTYIXNVNHKPSNTKVDKKVEPKSXDKTHTXPPXPAPELLGGPDVFLFPPKPKDTLMISRTPEVTXVVVDVSHEDPEVQFNWYVDGVEVHNAKTKPREEQFNSTFRVVSVLTVVHQDWLNGKEYKXKVSNKALPAPEEKTISKTKGQPREPQVYTLPPSREEMTKNQVSLTXLVKGFYPSDIAVEWESNGQPENNYKTTPPMLDSDGSFFLYSKLTVDKSRWQQGNVFSXSVMHEALHNHYTQKSLSLSPGK

SEQ ID NO: 513 - protein, 451 aa, Artificial Sequence
  Synthesized sequence with two or more selenocysteine residues substituted for two or more cysteine residues
  VARIANT (1)...(451): Xaa = selenocysteine or cysteine
EVQLVESGGGLVQPGGSLRLSXAASGFTFSRHWMHWLRQVPGKGPVWVSRINGAGTSITYADSVRGRFTISRDNANNTLFLQMNSLRADDTALYFXARANSVWFRGLFDYWGQGTPVTVSSASTKGPSVFPLAPSSKSTSGGTAALGXLVKDYFPEPVTVSWNSGALTSGVHTFPAVLQSSGLYSLSSVVTVPSSSLGTQTYIXNVNHKPSNTKVDKKVEPKSXDKTHTXPPXPAPELLGGPSVFLFPPKPKDTLMISRTPEVTXVVVDVSHEDPEVKFNWYVDGVEVHNAKTKPREEQYNSTYRVVSVLTVLHQDWLNGKEYKXKVSNKALPAPIEKTISKAKGQPREPQVYTLPPSRDELTKNQVSLTXLVKGFYPSDIAVEWESNGQPENNYKTTPPVLDSDGSFFLYSKLTVDKSRWQQGNVFSXSVMHEALHNHYTQKSLSLSPGK

SEQ ID NO: 514 - protein, 468 aa, Artificial Sequence
  Synthesized sequence with two or more selenocysteine residues substituted for two or more cysteine residues
  VARIANT (1)...(468): Xaa = selenocysteine or cysteine
MGVLILLWLFTAFPGILSDVQLQESGPGLVKPSQSLSLTXTVTGYSITSDYAWNWIRQFPGNKLEWMGYISYSGSTSYNPSLKSRVSITRDTSKNQFFLQLNSVTTEDTATYYXARFYYRYADYFDYWGQGTTLTVSSASTKGPSVFPLAPSSKSTSGGTAALGXLVKDYFPEPVTVSWNSGALTSGVHTFPAVLQSSGLYSLSSVVTVPSSSLGTQTYIXNVNHKPSNTKVDKKVEPKSXDKTHTXPPXPAPELLGGPSVFLFPPKPKDTLMISRTPEVTXVVVDVSHEDPEVKFNWYVDGVEVHNAKTKPREEQYNSTYRVVSVLTVLHQDWLNGKEYKXKVSNKALPAPIEKTISKAKGQPREPQVYTLPPSRDELTKNQVSLTXLVKGFYPSDIAVEWESNGQPENNYKTTPPVLDSDGSFFLYSKLTVDKSRWQQGNVFSXSVMHEALHNHYTQKSLSLSPGK

SEQ ID NO: 515 - protein, 442 aa, Artificial Sequence
  Synthesized sequence with two or more selenocysteine residues substituted for two or more cysteine residues
  VARIANT (1)...(442): Xaa = selenocysteine or cysteine
QVQLQQWGAGLLKPSETLSLTXAIYGGSFREYYWSWIRQPPGKGLEWIGEIFHSGSTNYNPSLKSRVTISVDTSKNQFSLKLSSVTAADTAVYYXAREELDDFDIWGQGTMVTVSSASTKGPSVFPLAPXSRSTSESTAALGXLVKDYFPEPVTVSWNSGALTSGVHTFPAVLQSSGLYSLSSVVTVPSSNFGTQTYTXNVDHKPSNTKVDKTVERKXXVEXPPXPAPPVAGPSVFLFPPKPKDTLMISRTPEVTXVVVDVSHEDPEVQFNWYVDGVEVHNAKTKPREEQFNSTFRVVSVLTVVHQDWLNGKEYKXKVSNKGLPAPIEKTISKTKGQPREPQVYTLPPSREEMTKNQVSLTXLVKGFYPSDIAVEWESNGQPENNYKTTPPMLDSDGSFFLYSKLTVDKSRWQQGNVFSXSVMHEALHNHYTQKSLSLSPGK

SEQ ID NO: 516 - protein, 449 aa, Artificial Sequence
  Synthesized sequence with two or more selenocysteine residues substituted for two or more cysteine residues
  VARIANT (1)...(449): Xaa = selenocysteine or cysteine
QVTLKESGPGLLKPTQTLTLTXTLSGFSLSTSGMGVGWFRQPPGKGLEWLAHIWWDDDKSYNPSLKSRLTISKDTSKNQVVLTITNVDPVDTATYYXARRQLGTRGTDAMDYWGQGTTVTVSSASTKGPSVFPLAPXSRSTSESTAALGXLVKDYFPEPVTVSWNSGALTSGVHTFPAVLQSSGLYSLSSVVTVTSSNFGTQTYTXNVDHKPSNTKVDKTVERKXXVEXPPXPAPPVAGPSVFLFPPKPKDTLMISRTPEVTXVVVDVSQEDPEVQFNWYVDGVEVHNAKTKPREEQFNSTFRVVSVLTVLHQDWLNGKEYKXKVSNKGLPSSIEKTISKTKGQPREPQVYTLPPSREEMTKNQVSLTXLVKGFYPSDIAVEWESNGQPENNYKTTPPMLDSDGSFFLYSKLTVDKSRWQQGNVFSXSVMHEALHNHYTQKSLSLSPGK

SEQ ID NO: 517 - protein, 438 aa, Artificial Sequence
  Synthesized sequence with two or more selenocysteine residues substituted for two or more cysteine residues
  VARIANT (1)...(438): Xaa = selenocysteine or cysteine
EVQLVQSGAEVKKPGASVKVSXKASGYTFTDYYIHWVRQAPGQGLEWMGWIHSNSGATTYAQKFQARVTMSRDTSSSTAYMELSRLESDDTAMYFXSREDYWGQGTLVTVSSASTKGPSVFPLAPXSRSTSESTAALGXLVKDYFPEPVTVSWNSGALTSGVHTFPAVLQSSGLYSLSSVVTVTSSNFGTQTYTXNVDHKPSNTKVDKTVERKXXVEXPPXPAPPVAGPSVFLFPPKPKDTLMISRTPEVTXVVVDVSQEDPEVQFNWYVDGVEVHNAKTKPREEQFNSTFRVVSVLTVLHQDWLNGKEYKXKVSNKGLPSSIEKTISKTKGQPREPQVYTLPPSREEMTKNQVSLTXLVKGFYPSDIAVEWESNGQPENNYKTTPPMLDSDGSFFLYSKLTVDKSRWQQGNVFSXSVMHEALHNHYTQKSLSLSPGK

SEQ ID NO: 518 - protein, 461 aa, Artificial Sequence
  Synthesized sequence with two or more selenocysteine residues substituted for two or more cysteine residues
  VARIANT (1)...(461): Xaa = selenocysteine or cysteine
MGWSYIILFLVATATDGHSQVQLQQPGTELVKPGASVKLSXKASGYTFTSYWIHWVKQRPGQGLEWIGEINPSSGRTNYNEKFKNKVTVTVDKSSTTAYMQLSNLTSEDSAVYYXASRGYWGQGTTLTVSSAKTTAPSVYPLAPVXGNTTGSSVTLGXLVKGYFPEPVTLTWNSGSLSSGVHTFPAVLQSDLYTLSSSVTVTSSTWPSQSITXNVAHPASSTKVDKKIEPRGPTIKPXPPXKXPAPNLLGGPSVFIFPPKIKDVLMISLSPIVTXVVVDVSEDDPDVQISWFVNNVEVHTAQTQTHREDYNSTLRVVSALPIQHQDWMSGKEFKXKVNNKDLPAPIERTISKPKGSVRAPQVYVLPPPEEEMTKKQVTLTXMVTDFMPEDIYVEWTNNGKTELNYKNTEPVLDSDGSYFMYSKLRVEKKNWVERNSYSXSVVHEGLHNHHTTKSFSRTPGK

SEQ ID NO: 519 - protein, 475 aa, Artificial Sequence
  Synthesized sequence with two or more selenocysteine residues substituted for two or more cysteine residues
  VARIANT (1)...(475): Xaa = selenocysteine or cysteine
MELGLXWLFLVAILEGVQXGVQLVESGGGLVQPGGSLRLSXAASGFTISRNDMHWVRQATGKGLEWVSAIGTGGDTYYPGSVKGRFTISRENAKNSLYLQMNSLRAGDTAVYYXARGHMTTFGGFIVIGNGMDVWGQGTTVTVSSASTKGPSVFPLAPSSKSTSGGTAALGXLVKDYFPEPVTVSWNSGALTSGVHTFPAVLQSSGLYSLSSVVTVPSSSLGTQTYIXNVNHKPSNTKVDKKVEPKSXDKTHTXPPXPAPELLGGPSVFLFPPKPKDTLMISRTPEVTXVVVDVSHEDPEVKFNWYVDGVEVHNAKTKPREEQYNSTYRVVSVLTVLHQDWLNGKEYKXKVSNKALPAPIEKTISKAKGQPREPQVYTLPPSRDELTKNQVSLTXLVKGFYPSDIAVEWESNGQPENNYKTTPPVLDSDGSFFLYSKLTVDKSRWQQGNVFSXSVMHEALHNHYTQKSLSLSPGK

SEQ ID NO: 520 - protein, 447 aa, Artificial Sequence
  Synthesized sequence with two or more selenocysteine residues substituted for two or more cysteine residues
  VARIANT (1)...(447): Xaa = selenocysteine or cysteine
EVQLVESGGGLVQPGGSLRLSXVASGFTFSNYWMNWVRQAPGKGLEWVAEIRLKSNNYATHYAESVKGRFTISRDDSKNTVYLQMNSLRAEDTAVYYXTRNGNYVDYAMDYWGQGTLVTVSSASTKGPSVFPLAPXSRSTSESTAALGXLVKDYFPEPVTVSWNSGALTSGVHTFPAVLQSSGLYSLSSVVTVPSSSLGTKTYTXNVDHKPSNTKVDKRVESKYGPPXPPXPAPEFEGGPSVFLFPPKPKDTLMISRTPEVTXVWDVSQEDPEVQFNWYVDGVEVHNAKTKPREEQFNSTYRWSVLTVLHQDWLNGKEYKXKVSNKGLPSSIEKTISKAKGQPREPQVYTLPPSQEEMTKNQVSLTXLVKGFYPSDIAVEWESNGQPENNYKTTPPVLDSDGSFFLYSRLTVDKSRWQEGNVFSXSVMHEALHNHYTQKSLSLSLGK

SEQ ID NO: 521 - protein, 442 aa, Artificial Sequence
  Synthesized sequence with two or more selenocysteine residues substituted for two or more cysteine residues
  VARIANT (1)...(442): Xaa = selenocysteine or cysteine
QVQLVQSGSELKKPGASVKLSXKASGFTFTTYGINWVRQAPGQGLEWIGWIYPRDGSTNFNENFKDRATITVDTSASTAYMELSSLRSEDTAVYFXARLTGGTFLDYWGQGTTVTVSSASTKGPSVFPLAPXSRSTSESTAALGXLVKDYFPEPVTVSWNSGALTSGVHTFPAVLQSSGLYSLSSWTVPSSSLGTKTYTXNVDHKPSNTKVDKRVESKYGPPXPPXPAPEFLGGPSVFLFPPKPKDTLMISRTPEVTXWVDVSQEDPEVQFNWYVDGVEVHNAKTKPREEQFNSTYRWSVLTVLHQDWLNGKEYKXKVSNKGLPSSIEKTISKAKGQPREPQVYTLPPSQEEMTKNQVSLTXLVKGFYPSDIAVEWESNGQPENNYKTTPPVLDSDGSFFLYSRLTVDKSRWQEGNVFSXSVMHEALHNHYTQKSLSLSLGK

SEQ ID NO: 522 - protein, 450 aa, Artificial Sequence
  Synthesized sequence with two or more selenocysteine residues substituted for two or more cysteine residues
  VARIANT (1)...(450): Xaa = selenocysteine or cysteine
QVQLVQSGAEVKKPGASVKVSXKASGYAFSSSWMNWVRQAPGQGLEWIGRIYPGDGDTKYNGKFKGKATLTADKSTSTAYMELSSLRSEDTAVYYXARSTMIATGAMDYWGQGTLVTVSSASTKGPSVFPLAPSSKSTSGGTAALGXLVKDYFPEPVTVSWNSGALTSGVHTFPAVLQSSGLYSLSSVVTVPSSSLGTQTYIXNVNHKPSNTKVDKKVEPKSXDKTHTXPPXPAPELLGGPSVFLFPPKPKDQLMISRTPEVTXVVVDVSHEDPEVKFNWYVDGVEVHNAKTKPREEQYNSTYRVVSVLTVLHQDWLNGKEYKXKVSNKALPAPIEKTISKAKGQPREPQVYTLPPSREEMTKNQVSLTXLVKGFYPSDIAVEWESNGQPENNYKTTPPVLDSDGSFFLYSKLTVDKSRWQQGNVFSXSVLHEALHNHYTQKSLSLSPGK

SEQ ID NO: 523 - protein, 469 aa, Artificial Sequence
  Synthesized sequence with two or more selenocysteine residues substituted for two or more cysteine residues
  VARIANT (1)...(469): Xaa = selenocysteine or cysteine
MDWTWSILFLVAAATGAHSQVQLVQSGAEVKKPGASVKVSXKASGYTFTSYGINWVRQAPGQGLEWMGWISVYSGNTNYAQKVQGRVTMTADTSTSTAYMDLRSLRSDDTAVYYXAREGSSSSGDYYYGMDVWGQGTTVTVSSASTKGPSVFPLAPXSRSTSESTAALGXLVKDYFPEPVTVSWNSGALTSGVHTFPAVLQSSGLYSLSSVVTVPSSNFGTQTYTXNVDHKPSNTKVDKTVERKXXVEXPPXPAPPVAGPSVFLFPPKPKDTLMISRTPEVTXVVVDVSHEDPEVQFNWYVDGVEVHNAKTKPREEQFNSTFRVVSVLTVVHQDWLNGKEYKXKVSNKGLPAPIEKTISKTKGQPREPQVYTLPPSREEMTKNQVSLTXLVKGFYPSDIAVEWESNGQPENNYKTTPPMLDSDGSFFLYSKLTVDKSRWQQGNVFSXSVMHEALHNHYTQKSLSLSPGK

SEQ ID NO: 524 - protein, 432 aa, Artificial Sequence
  Synthesized sequence with two or more selenocysteine residues substituted for two or more cysteine residues
  VARIANT (1)...(432): Xaa = selenocysteine or cysteine
EVQLVESGGGLVKPGGSLRLSXAASGFTFDDSVMHWVRQAPGKGLEWVSLVGWDGFFTYYADSVKGRFTISRDNAKNSLYLQMNSLRAEDTAVYYXARQGDYMGNNWGQGTLVTVSSASTKGPSVFPLAPSSKSTSGGTAALGXLVKDYFPEPVTVSWNSGALTSGVHTFPAVLQSSGLYSLSSVVTVPSSSLGTQTYIXNVNHKPSNTKVDKKVAPELLGGPSVFLFPPKPKDTLMISRTPEVTXVVVDVSHEDPEVKFNWYVDGVEVHNAKTKPREEQYNSTYRVVSVLTVLHQDWLNGKEYKXKVSNKALPAPIEKTISKAKGQPREPQVYTLPPSREEMTKNQVSLTXLVKGFYPSDIAVEWESNGQPENNYKTTPPVLDSDGSFFLYSKLTVDKSRWQQGNVFSXSVMHEALHNHYTQKSLSLSPGK

SEQ ID NO: 525 - protein, 449 aa, Artificial Sequence
  Synthesized sequence with two or more selenocysteine residues substituted for two or more cysteine residues
  VARIANT (1)...(449): Xaa = selenocysteine or cysteine
EVQLVESGGGLVQPGGSLRLSXAASGFSLTNNNVNWVRQAPGKGLEWVGGVWAGGATDYNSALKSRFTISRDNSKNTAYLQMNSLRAEDTAVYYXARDGGYSSSTLYAMDAWGQGTLVTVSSASTKGPSVFPLAPXSRSTSESTAALGXLVKDYFPEPVTVSWNSGALTSGVHTFPAVLQSSGLYSLSSVVTVPSSSLGTKTYTXNVDHKPSNTKVDKRVESKYGPPXPPXPAPEFLGGPSVFLFPPKPKDTLMISRTPEVTXVVVDVSQEDPEVQFNWYVDGVEVHNAKTKPREEQFNSTYRVVSVLTVLHQDWLNGKEYKXKVSNKGLPSSIEKTISKAKGQPREPQVYTLPPSQEEMTKNQVSLTXLVKGFYPSDIAVEWESNGQPENNYKTTPPVLDSDGSFFLYSRLTVDKSRWQEGNVFSXSVMHEALHNHYTQKSLSLSLGK

SEQ ID NO: 526 - protein, 451 aa, Artificial Sequence
  Synthesized sequence with two or more selenocysteine residues substituted for two or more cysteine residues
  VARIANT (1)...(451): Xaa = selenocysteine or cysteine
EVQLVESGGGLVQPGGSLRLSXAASGFTFSSTAIHWVRQAPGKGLEWVARISPANGNTNYADSVKGRFTISADTSKNTAYLQMNSLRAEDTAVYYXARWIGSRELYIMDYWGQGTLVTVSSASTKGPSVFPLAPSSKSTSGGTAALGXLVKDYFPEPVTVSWNSGALTSGVHTFPAVLQSSGLYSLSSVVTVPSSSLGTQTYIXNVNHKPSNTKVDKKVEPKSXDKTHTXPPXPAPELLGGPSVFLFPPKPKDTLMISRTPEVTXVVVDVSHEDPEVKFNWYVDGVEVHNAKTKPREEQYNSTYRVVSVLTVLHQDWLNGKEYKXKVSNKALPAPIEKTISKAKGQPREPQVYTLPPSREEMTKNQVSLTXLVKGFYPSDIAVEWESNGQPENNYKTTPPVLDSDGSFFLYSKLTVDKSRWQQGNVFSXSVMHEALHNHYTQKSLSLSPGK

SEQ ID NO: 527 - protein, 437 aa, Artificial Sequence
  Synthesized sequence with two or more selenocysteine residues substituted for two or more cysteine residues
  VARIANT (1)...(437): Xaa = selenocysteine or cysteine
QVQLVQSGAEVKKPGASVKVSXKASGYTFTNYDIIWVRQAPGQGLEWMGYINPYNDGTKYNEKFKGRVTMTRDTSTSTVYMELSSLRSEDTAVYYXARLLKYRRFRYYAIDYWGQGTTVTVSSASTKGPSVFPLAPXSRSTSESTAALGXLVKDYFPEPVTVSWNSGALTSGVHTFPAVLQSSGLYSLSSVVTVPSSNFGTQTYTXNVDHKPSNTKVDKTVAPPVAGPSVFLFPPKPKDTLMISRTPEVTXVVVDVSHEDPEVQFNWYVDGVEVHNAKTKPREEQFNSTFRVVSVLTVVHQDWLNGKEYKXKVSNKGLPSSIEKTISKTKGQPREPQVYTLPPSREEMTKNQVSLTXLVKGFYPSDIAVEWESNGQPENNYKTTPPMLDSDGSFFLYSKLTVDKSRWQQGNVFSXSVMHEALHNHYTQKSLSLSPGK

SEQ ID NO: 528 - protein, 467 aa, Artificial Sequence
  Synthesized sequence with two or more selenocysteine residues substituted for two or more cysteine residues
  VARIANT (1)...(467): Xaa = selenocysteine or cysteine
MGWSXIILFLVATATGVHSQVQLVQSGAEVVKPGASVKISXKASGYTFTAYYMHWVKQSPVQSLEWIGLVNPYNGFSSYNQKFQGKASLTVDRSSSTAYMELHSLTSEDSAVYYXAREFYGYRYFDVWGQGTAVTVSSASTKGPSVFPLAPSSKSTSGGTAALGXLVKDYFPEPVTVSWNSGALTSGVHTFPAVLQSSGLYSLSSVVTVPSSSLGTQTYIXNVNHKPSNTKVDKKVEPKSXDKTHTXPPXPAPELLGGPSVFLFPPKPKDTLMISRTPEVTXVVVDVSHEDPEVKFNWYVDGVEVHNAKTKPREEQYNSTYRVVSVLTVLHQDWLNGKEYKXKVSNKALPAPIEKTISKAKGQPREPQVYTLPPSRDELTKNQVSLTXLVKGFYPSDIAVEWESNGQPENNYKTTPPVLDSDGSFFLYSKLTVDKSRWQQGNVFSXSVMHEALHNHYTQKSLSLSPG

SEQ ID NO: 529 - protein, 450 aa, Artificial Sequence
  Synthesized sequence with two or more selenocysteine residues substituted for two or more cysteine residues
  VARIANT (1)...(450): Xaa = selenocysteine or cysteine
QVQLQQSGAELVRSGASIKLSXTASGFNIKHYYMHWVKQRPEQGLEWIGWINPENVDTEYAPKFQGKATMTADTSSNTAYLQLSSLTSEDTAVYYXNHYRYAGGGALDYWGQGTTVTVSSASTKGPSVFPLAPSSKSTSGGTAALGXLVKDYFPEPVTVSWNSGALTSGVHTFPAVLQSSGLYSLSSVVTVPSSSLGTQTYIXNVNHKPSNTKVDKKVEPKSXDKTHTXPPXPAPELLGGPSVFLFPPKPKDTLMISRTPEVTXVVVDVSHEDPEVKFNWYVDGVEVHNAKTKPREEQYNSTYRVVSVLTVLHQDWLNGKEYKXKVSNKALPAPIEKTISKAKGQPREPQVYTLPPSRDELTKNQVSLTXLVKGFYPSDIAVEWESNGQPENNYKTTPPVLDSDGSFFLYSKLTVDKSRWQQGNVFSXSVMHEALHNHYTQKSLSLSPGK

SEQ ID NO: 530 - protein, 469 aa, Artificial Sequence
  Synthesized sequence with two or more selenocysteine residues substituted for two or more cysteine residues
  VARIANT (1)...(469): Xaa = selenocysteine or cysteine
MDXTWRILFLVAAATGTHAEVQLVQSGAEVKKPGASVKVSXKVSGYTFSGNWIEWVRQAPGKGLEWIGEILPGSGNTNYNEKFKGKATMTADTSTDTAYMELSSLRSEDTAVYYXARGGHYYGSSWDYWGQGTLVTVSSASTKGPSVFPLAPSSKSTSGGTAALGXLVKDYFPEPVTVSWNSGALTSGVHTFPAVLQSSGLYSLSSVVTVPSSSLGTQTYIXNVNHKPSNTKVDKRVEPKSXDKTHTXPPXPAPELLGGPSVFLFPPKPKDTLMISRTPEVTXVVVDVSHEDPEVKFNWYVDGVEVHNAKTKPREEQYNSTYRVVSVLTVLHQDWLNGKEYKXKVSNKALPAPIEKTISKAKGQPREPQVYTLPPSREEMTKNQVSLTXLVKGFYPSDIAVEWESNGQPENNYKTTPPVLDSDGSFFLYSKLTVDKSRWQQGNVFSXSVMHEALHNHYTQKSLSLSPGK

SEQ ID NO: 531 - protein, 467 aa, Artificial Sequence
  Synthesized sequence with two or more selenocysteine residues substituted for two or more cysteine residues
  VARIANT (1)...(467): Xaa = selenocysteine or cysteine
MEWIWIFLLILSGTRGVQSQVQLVQSGAEVKKPGASVKVSXKASGYTFTAYVISWVRQAPGQGLEWMGEIYPGSGSSYYNEKFKGRVTNTRDTSTSTVYMELSSLRSEDTAVYYXARSGDGSRFVYWGQGTLVTVSSASTKGPSVFPLAPSSKSTSGGTAALGXLVKDYFPEPVTVSWNSGALTSGVHTFPAVLQSSGLYSLSSVVTVPSSSLGTQTYIXNVNHKPSNTKVDKKVEPKSXDKTHTXPPXPAPELLGGPSVFLFPPKPKDTLMISRTPEVTXVVVDVSHEDPEVKFNWYVDGVEVHNAKTKPREEQYASTYRVVSVLTVLHQDWLNGKEYKXKVSNKALPAPIEKTISKAKGQPREPQVYTLPPSRDELTKNQVSLTXLVKGFYPSDIAVEWESNGQPENNYKTTPPVLQSDGSFFLYSKLTVDKSRWQQGNVFSXSVMHEALHNHYTQKSLSLSPGK

SEQ ID NO: 532 - protein, 452 aa, Artificial Sequence
  Synthesized sequence with two or more selenocysteine residues substituted for two or more cysteine residues
  VARIANT (1)...(452): Xaa = selenocysteine or cysteine
EVQLLESGGGLVQPGGSLRLSXAASGFTFNNYDMTWVRQAPGKGLEWVAVISYDGSDKDYADSVKGRFTISRDNSKNTLYLQMNSLRAEDTAVYYXARVYYYGFSGPSMDVWGQGTLVTVSSASTKGPSVFPLAPSSKSTSGGTAALGXLVKDYFPEPVTVSWNSGALTSGVHTFPAVLQSSGLYSLSSVVTVPSSSLGTQTYIXNVNHKPSNTKVDKRVEPKSXDKTHTXPPXPAPELLGGPSVFLFPPKPKDTLMISRTPEVTXVVVDVSHEDPEVKFNWYVDGVEVHNAKTKPREEQYNSTYRVVSVLTVLHQDWLNGKEYKXKVSNKALPAPIEKTISKAKGQPREPQVYTLPPSREEMTKNQVSLTXLVKGFYPSDIAVEWESNGQPENNYKTTPPVLDSDGSFFLYSKLTVDKSRWQQGNVFSXSVMHEALHNHYTQKSLSLSPGK

SEQ ID NO: 533 - protein, 464 aa, Artificial Sequence
  Synthesized sequence with two or more selenocysteine residues substituted for two or more cysteine residues
  VARIANT (1)...(464): Xaa = selenocysteine or cysteine
MGWSRIFLFLLSITAGVHXQVQLQQSGPELVKPGASVKISXKASGYAFSISWMNWVKQRPGQGLEWIGRIFPGDGDTNYNGKFKDKATLTADKSSSTAYMYLSSLTSVDSAVYFXTRWDFTAVAPTFDVWGAGTTVTVSSAKTTPPSVYPLAPGSAAQTNSMVTLGXLVKGYFPEPVTVTWNSGSLSSGVHTFPAVLQSDLYTLSSSVTVPSSTWPSETVTXNVAHPASSTKVDKKIVPRDXGXKPXIXTVPEVSSVFIFPPKPKDVLTITLTPKVTXVVVDISKDDPEVQFSWFVDDVEVHTAQTQPREEQFNSTFRSVSELPIMHQDWLNGKEFKXRVNSAAFPAPIEKTISKTKGRPKAPQVYTIPPPKEQMAKDKVSLTXMITDFFPEDITVEWQWNGQPAENYKNTQPIMDTDGSYFVYSKLNVQKSNWEAGNTFTXSVLHEGLHNHHTEKSLSHSPGK

SEQ ID NO: 534 - protein, 453 aa, Artificial Sequence
  Synthesized sequence with two or more selenocysteine residues substituted for two or more cysteine residues
  VARIANT (1)...(453): Xaa = selenocysteine or cysteine
EVQLLQSGGGLTHPGGSLRLSXAASGFPFHKYTMTWVRQPPGKGLEWVSSVSGVNGKTYYSPSVRGRAIVSRDDSNSMLFLEIKNMTAGDTALYFXAKGPGGHLHYYYGLDVWGHGTSVTVSSASTKGPSVFPLAPSSKSTSGGTAALGXLVKDYFPEPVTVSWNSGALTSGVHTFPAVLQSSGLYSLSSVVTVPSSSLGTQTYIXNVNHKPSNTKVDKRVEPKSXDKTHTXPPXPAPELLGGPSVFLFPPKPKDTLMISRTPEVTXVVVDVSHEDPEVKFNWYVDGVEVHNAKTKPREEQYNSTYRVVSVLTVLHQDWLNGKEYKXKVSNKALPAPIEKTISKAKGQPREPQVYTLPPSREEMTKNQVSLTXLVKGFYPSDIAVEWESNGQPENNYKTTPPVLDSDGSFFLYSKLTVDKSRWQQGNVFSXSVMHEALHNHYTQKSLSLSPGK

SEQ ID NO: 535 - protein, 228 aa, Artificial Sequence
  Synthesized sequence with two or more selenocysteine residues substituted for two or more cysteine residues
  VARIANT (1)...(228): Xaa = selenocysteine or cysteine
EVQLVESGGGLVQPGRSLRLSXSASGFTFGDYAMSWFRLAPGKGLEWVGLIKSRAIDGTPQYAASVKGRFTISRDDSNSIAYLQMNSLTTEDTAIYYXARDFYDFWNEFSHRTFDFWGQGTLVTVSSASTKGPSVFPLAPSSKSTSGGTAALGXLVKDYFPEPVTVSWNSGALTSGVHTFPAVLQSSGLYSLSSVVTVPSSSLGTQTYIXNVNHKPSNTKVDKRVEPK

SEQ ID NO: 536 - protein, 454 aa, Artificial Sequence
  Synthesized sequence with two or more selenocysteine residues substituted for two or more cysteine residues
  VARIANT (1)...(454): Xaa = selenocysteine or cysteine
QVQLQQSGPGLVKPSQTLSLTXAISGDSVSSNSAAWGWIRQSPGRGLEWLGRIYYRSKWYNSYAVSVKSRITINPDTSKNQFSLQLNSVTPEDTAVYYXARYDWVPKIGVFDSWGQGTLVTVSSASTKGPSVFPLAPSSKSTSGGTAALGXLVKDYFPEPVTVSWNSGALTSGVHTFPAVLQSSGLYSLSSVVTVPSSSLGTQTYIXNVNHKPSNTKVDKRVEPKSXDKTHTXPPXPAPELLGGPSVFLFPPKPKDTLMISRTPEVTXVVVDVSHEDPEVKFNWYVDGVEVHNAKTKPREEQYNSTYRVVSVLTVLHQDWLNGKEYKXKVSNKALPAPIEKTISKAKGQPREPQVYTLPPSREEMTKNQVSLTXLVKGFYPSDIAVEWESNGQPENNYKTTPPVLDSDGSFFLYSKLTVDKSRWQQGNVFSXSVMHEALHNHYTQKSLSLSPGK

SEQ ID NO: 537 - protein, 448 aa, Artificial Sequence
  Synthesized sequence with two or more selenocysteine residues substituted for two or more cysteine residues
  VARIANT (1)...(448): Xaa = selenocysteine or cysteine
EVRLLESGGGLVQPGGSLRLSXAASGFTFRPRAMAWVRQAPGKGLEWVSSISAQGASAYYADSVKGRFTISRDNSKNTLYLQMNSLRAEDTAVYYXARDLSVSGFGPWGRGTMVTVSSASTKGPSVFPLAPSSKSTSGGTAALGXLVKDYFPEPVTVSWNSGALTSGVHTFPAVLQSSGLYSLSSVVTVPSSSLGTQTYIXNVNHKPSNTKVDKRVEPKSXDKTHTXPPXPAPELLGGPSVFLFPPKPKDTLMISRTPEVTXVVVDVSHEDPEVKFNWYVDGVEVHNAKTKPREEQYNSTYRVVSVLTVLHQDWLNGKEYKXKVSNKALPAPIEKTISKAKGQPREPQVYTLPPSREEMTKNQVSLTXLVKGFYPSDIAVEWESNGQPENNYKTTPPVLDSDGSFFLYSKLTVDKSRWQQGNVFSXSVMHEALHNHYTQKSLSLSPGK

SEQ ID NO: 538 - protein, 449 aa, Artificial Sequence
  Synthesized sequence with two or more selenocysteine residues substituted for two or more cysteine residues
  VARIANT (1)...(449): Xaa = selenocysteine or cysteine
EVQLVESGGGLVQPGGSLRLSXAASGYTFTNFGMNWVRQAPGKGLEWVAWINTNTGEPRYAEEFKGRFTISRDNAKNSLYLQMNSLRAEDTAVYYXARDWDGAYFFDYWGQGTLVTVSSASTKGPSVFPLAPSSKSTSGGTAALGXLVKDYFPEPVTVSWNSGALTSGVHTFPAVLQSSGLYSLSSVVTVPSSSLGTQTYIXNVNHKPSNTKVDKKVEPKSXDKTHTXPPXPAPELLGGPSVFLFPPKPKDTLMISRTPEVTXVVVDVSHEDPEVKFNWYVDGVEVHNAKTKPREEQYNSTYRVVSVLTVLHQDWLNGKEYKXKVSNKALPAPIEKTISKAKGQPREPQVYTLPPSREEMTKNQVSLTXLVKGFYPSDIAVEWESNGQPENNYKTTPPVLDSDGSFFLYSKLTVDKSRWQQGNVFSXSVMHEALHNHYTQKSLSLSPGK

SEQ ID NO: 539 - protein, 443 aa, Artificial Sequence
  Synthesized sequence with two or more selenocysteine residues substituted for two or more cysteine residues
  VARIANT (1)...(443): Xaa = selenocysteine or cysteine
QVKLQESGAELARPGASVKLSXKASGYTFTNYWMQWVKQRPGQGLDWIGAIYPGDGNTRYTHKFKGKATLTADKSSSTAYMQLSSLASEDSGVYYXARGEGNYAWFAYWGQGTTVTVSSAKTTPPSVYPLAPGSAAQTNSMVTLGXLVKGYFPEPVTVTWNSGSLSSGVHTFPAVLQSDLYTLSSSVTVPSSTWPSETVTXNVAHPASSTKVDKKIVPRDXGXKPXIXTVPEVSSVFIFPPKPKDVLTITLTPKVTXVVVDISKDDPEVQFSWFVDDVEVHTAQTQPREEQFNSTFRSVSELPIMHQDWLNGKEFKXRVNSAAFPAPIEKTISKTKGRPKAPQVYTIPPPKEQMAKDKVSLTXMITDFFPEDITVEWQWNGQPAENYKNTQPIMDTDGSYFVYSKLNVQKSNWEAGNTFTXSVLHEGLHNHHTEKSLSHSPGK

SEQ ID NO: 540 - protein, 446 aa, Artificial Sequence
  Synthesized sequence with two or more selenocysteine residues substituted for two or more cysteine residues
  VARIANT (1)...(446): Xaa = selenocysteine or cysteine
QVQLQQSGGELAKPGASVKVSXKASGYTFSSFWMHWVRQAPGQGLEWIGYINPRSGYTEYNEIFRDKATMTTDTSTSTAYMELSSLRSEDTAVYYXASFLGRGAMDYWGQGTTVTVSSASTKGPSVFPLAPXSRSTSESTAALGXLVKDYFPEPVTVSWNSGALTSGVHTFPAVLQSSGLYSLSSVVTVPSSNFGTQTYTXNVDHKPSNTKVDKTVEPKSSDKTHTXPPXPAPPVAGPSVFLFPPKPKDTLMISRTPEVTXWVDVSHEDPEVQFNWYVDGVEVHNAKTKPREEQAQSTFRVVSVLTVVHQDWLNGKEYKXKVSNKGLPAPIEKTISKTKGQPREPQVYTLPPSREEMTKNQVSLTXLVKGFYPSDIAVEWESNGQPENNYKTTPPMLDSDGSFFLYSKLTVDKSRWQQGNVFSXSVMHEALHNHYTQKSLSLSPGK

SEQ ID NO: 541 - protein, 444 aa, Artificial Sequence
  Synthesized sequence with two or more selenocysteine residues substituted for two or more cysteine residues
  VARIANT (1)...(444): Xaa = selenocysteine or cysteine
QVQLVQSGAEVKKPGASVKVSXKVSGYTLSDLSIHWVRQAPGKGLEWMGGFDPQDGETIYAQKFQGRVTMTEDTSTDTAYMELSSLKSEDTAVYYXATGSSSSWFDPWGQGTLVTVSSASTKGPSVFPLAPXSRSTSESTAALGXLVKDYFPEPVTVSWNSGALTSGVHTFPAVLQSSGLYSLSSVVTVPSSNFGTQTYTXNVDHKPSNTKVDKTVERKXXVEXPPXPAPPVAGPSVFLFPPKPKDTLMISRTPEVTXVVVDVSHEDPEVQFNWYVDGVEVHNAKTKPREEQFNSTFRVVSVLTVVHQDWLNGKEYKXKVSNKGLPAPIEKTISKTKGQPREPQVYTLPPSREEMTKNQVSLTXLVKGFYPSDIAVEWESNGQPENNYKTTPPMLDSDGSFFLYSKLTVDKSRWQQGNVFSXSVMHEALHNHYTQKSLSLSPGK

SEQ ID NO: 542 - protein, 449 aa, Artificial Sequence
  Synthesized sequence with two or more selenocysteine residues substituted for two or more cysteine residues
  VARIANT (1)...(449): Xaa = selenocysteine or cysteine
EVQLVQSGAEVKKSGESLKISXKGSGYSFTSYWIGWVRQMPGKGLEWMGIFYPGDSSTRYSPSFQGQVTISADKSVNTAYLQWSSLKASDTAMYYXARRRNWGNAFDIWGQGTMVTVSSASTKGPSVFPLAPSSKSTSGGTAALGXLVKDYFPEPVTVSWNSGALTSGVHTFPAVLQSSGLYSLSSVVTVPSSSLGTQTYIXNVNHKPSNTKVDKRVEPKSXDKTHTXPPXPAPELLGGPSVFLFPPKPKDTLMISRTPEVTXVVVDVSHEDPEVKFNWYVDGVEVHNAKTKPREEQYNSTYRVVSVLTVLHQDWLNGKEYKXKVSNKALPAPIEKTISKAKGQPREPQVYTLPPSREEMTKNQVSLTXLVKGFYPSDIAVEWESNGQPENNYKTTPPVLDSDGSFFLYSKLTVDKSRWQQGNVFSXSVMHEALHNHYTQKSLSLSPGK

SEQ ID NO: 543 - protein, 457 aa, Artificial Sequence
  Synthesized sequence with two or more selenocysteine residues substituted for two or more cysteine residues
  VARIANT (1)...(457): Xaa = selenocysteine or cysteine
EVQLLESGGGVVQPGRSLRLSXAASGFTFSSYGMHWVRQAPGKGLEWVAVISYDGSNKYYADSVKGRFTISRDNSKNTLYLQMNSLRAEDTAVYYXAKDMGWGSGWRPYYYYGMDVWGQGTTVTVSSASTKGPSVFPLAPSSKSTSGGTAALGXLVKDYFPEPVTVSWNSGALTSGVHTFPAVLQSSGLYSLSSVVTVPSSSLGTQTYIXNVNHKPSNTKVDKKVEPKSXDKTHTXPPXPAPELLGGPSVFLFPPKPKDTLMISRTPEVTXVVVDVSHEDPEVKFNWYVDGVEVHNAKTKPREEQYNSTYRVVSVLTVLHQDWLNGKEYKXKVSNKALPAPIEKTISKAKGQPREPQVYTLPPSRDELTKNQVSLTXLVKGFYPSDIAVEWESNGQPENNYKTTPPVLDSDGSFFLYSKLTVDKSRWQQGNVFSXSVMHEALHNHYTQKSLSLSPGK

SEQ ID NO: 544 - protein, 453 aa, Artificial Sequence
  Synthesized sequence with two or more selenocysteine residues substituted for two or more cysteine residues
  VARIANT (1)...(453): Xaa = selenocysteine or cysteine
QVQLVESGGGVVQPGRSLRLSXAASGFAFSSYGMHWVRQAPGKGLEWVAVIWFDGTKKYYTDSVKGRFTISRDNSKNTLYLQMNTLRAEDTAVYYXARDRGIGARRGPYYMDVWGKGTTVTVSSASTKGPSVFPLAPSSKSTSGGTAALGXLVKDYFPEPVTVSWNSGALTSGVHTFPAVLQSSGLYSLSSVVTVPSSSLGTQTYIXNVNHKPSNTKVDKRVEPKSXDKTHTXPPXPAPELLGGPSVFLFPPKPKDTLMISRTPEVTXVVVDVSHEDPEVKFNWYVDGVEVHNAKTKPREEQYNSTYRVVSVLTVLHQDWLNGKEYKXKVSNKALPAPIEKTISKAKGQPREPQVYTLPPSREEMTKNQVSLTXLVKGFYPSDIAVEWESNGQPENNYKTTPPVLDSDGSFFLYSKLTVDKSRWQQGNVFSXSVMHEALHNHYTQKSLSLSPG

SEQ ID NO: 545 - protein, 453 aa, Artificial Sequence
  Synthesized sequence with two or more selenocysteine residues substituted for two or more cysteine residues
  VARIANT (1)...(453): Xaa = selenocysteine or cysteine
EVQLVESGGGLVQPGRSLRLSXAASGFTFDDYAMHWVRQAPGKGLEWVSGINWSSGGIGYADSVKGRFTISRDNAKNSLYLQMNSLRAEDTALYYXARDIGGFGEFYWNFGLWGRGTLVTVSSASTKGPSVFPLAPSSKSTSGGTAALGXLVKDYFPEPVTVSWNSGALTSGVHTFPAVLQSSGLYSLSSVVTVPSSSLGTQTYIXNVNHKPSNTKVDKRVEPKSXDKTHTXPPXPAPELLGGPSVFLFPPKPKDTLMISRTPEVTXVVVDVSHEDPEVKFNWYVDGVEVHNAKTKPREEQYNSTYRVVSVLTVLHQDWLNGKEYKXKVSNKALPAPIEKTISKAKGQPREPQVYTLPPSREEMTKNQVSLTXLVKGFYPSDIAVEWESNGQPENNYKTTPPVLDSDGSFFLYSKLTVDKSRWQQGNVFSXSVMHEALHNHYTQKSLSLSPGK

SEQ ID NO: 546 - protein, 444 aa, Artificial Sequence
  Synthesized sequence with two or more selenocysteine residues substituted for two or more cysteine residues
  VARIANT (1)...(444): Xaa = selenocysteine or cysteine
EVQLVESGGGLVQPGGSLRLSXAASGFTFSSYGMSWVRQAPGKGLEWVATITSGGSYTYYVDSVKGRFTISRDNAKNTLYLQMNSLRAEDTAVYYXVRIGEDALDYWGQGTLVTVSSASTKGPSVFPLAPXSRSTSESTAALGXLVKDYFPEPVTVSWNSGALTSGVHTFPAVLQSSGLYSLSSVVTVPSSSLGTKTYTXNVDHKPSNTKVDKRVESKYGPPXPSXPAPEFLGGPSVFLFPPKPKDTLMISRTPEVTXVVVDVSQEDPEVQFNWYVDGVEVHNAKTKPREEQFNSTYRVVSVLTVLHQDWLNGKEYKXKVSNKGLPSSIEKTISKAKGQPREPQVYTLPPSQEEMTKNQVSLTXLVKGFYPSDIAVEWESNGQPENNYKTTPPVLDSDGSFFLYSRLTVDKSRWQEGNVFSXSVMHEALHNHYTQKSLSLSLGK

SEQ ID NO: 547 - protein, 219 aa, Artificial Sequence
  Synthesized sequence with two or more selenocysteine residues substituted for two or more cysteine residues
  VARIANT (1)...(219): Xaa = selenocysteine or cysteine
QVQLQESGPGLVRPSQTLSLTXTVSGFTFTDFYMNWVRQPPGRGLEWIGFIRDKAKGYTTEYNPSVKGRVTMLVDTSKNQFSLRLSSVTAADTAVYYXAREGHTAAPFDYWGQGSLVTVSSASTKGPSVFPLAPSSKSTSGGTAALGXLVKDYFPEPVTVSWNSGALTSGVHTFPAVLQSSGLYSLSSVVTVPSSSLGTQTYIXNVNHKPSNTKVDKKV

SEQ ID NO: 548 - protein, 447 aa, Artificial Sequence
  Synthesized sequence with two or more selenocysteine residues substituted for two or more cysteine residues
  VARIANT (1)...(447): Xaa = selenocysteine or cysteine
EVQLVESGGGLVQPGGSLRLSXAASGFTFNNYAMNWVRQAPGKGLDWVSTISGSGGTTNYADSVKGRFIISRDSSKHTLYLQMNSLRAEDTAVYYXAKDSNWGNFDLWGRGTLVTVSSASTKGPSVFPLAPSSKSTSGGTAALGXLVKDYFPEPVTVSWNSGALTSGVHTFPAVLQSSGLYSLSSVVTVPSSSLGTQTYIXNVNHKPSNTKVDKKVEPKSXDKTHTXPPXPAPELLGGPSVFLFPPKPKDTLMISRTPEVTXVVVDVSHEDPEVKFNWYVDGVEVHNAKTKPREEQYNSTYRVVSVLTVLHQDWLNGKEYKXKVSNKALPAPIEKTISKAKGQPREPQVYTLPPSRDELTKNQVSLTXLVKGFYPSDIAVEWESNGQPENNYKTTPPVLDSDGSFFLYSKLTVDKSRWQQGNVFSXSVMHEALHNHYTQKSLSLSPG

SEQ ID NO: 549 - protein, 449 aa, Artificial Sequence
  Synthesized sequence with two or more selenocysteine residues substituted for two or more cysteine residues
  VARIANT (1)...(449): Xaa = selenocysteine or cysteine
QVQLQQSGPELEKPGASVKISXKASGYSFTGYTMNWVKQSHGKSLEWIGLITPYNGASSYNQKFRGKATLTVDKSSSTAYMDLLSLTSEDSAVYFXARGGYDGRGFDYWGSGTPVTVSSASTKGPSVFPLAPSSKSTSGGTAALGXLVKDYFPEPVTVSWNSGALTSGVHTFPAVLQSSGLYSLSSVVTVPSSSLGTQTYIXNVNHKPSNTKVDKKVEPKSXDKTHTXPPXPAPELLGGPSVFLFPPKPKDTLMISRTPEVTXVVVDVSHEDPEVKFNWYVDGVEVHNAKTKPREEQYNSTYRVVSVLTVLHQDWLNGKEYKXKVSNKALPAPIEKTISKAKGQPREPQVYTLPPSRDELTKNQVSLTXLVKGFYPSDIAVEWESNGQPENNYKTTPPVLDSDGSFFLYSKLTVDKSRWQQGNVFSXSVMHEALHNHYTQKSLSLSPGK

SEQ ID NO: 550 - protein, 442 aa, Artificial Sequence
  Synthesized sequence with two or more selenocysteine residues substituted for two or more cysteine residues
  VARIANT (1)...(442): Xaa = selenocysteine or cysteine
QVQLQESGPGLVKPSETLSLTXTVSGFSLLSYGVHWVRQPPGKGLEWLGVIWTGGTTNYNSALMSRFTISKDDSKNTVYLKMNSLKTEDTAIYYXARYYYGMDYWGQGTLVTVSSASTKGPSVFPLAPXSRSTSESTAALGXLVKDYFPEPVTVSWNSGALTSGVHTFPAVLQSSGLYSLSSVVTVPSSSLGTKTYTXNVDHKPSNTKVDKRVESKYGPPXPPXPAPEFLGGPSVFLFPPKPKDTLMISRTPEVTXVVVDVSQEDPEVQFNWYVDGVEVHNAKTKPREEQFNSTYRVVSVLTVLHQDWLNGKEYKXKVSNKGLPSSIEKTISKAKGQPREPQVYTLPPSQEEMTKNQVSLTXLVKGFYPSDIAVEWESNGQPENNYKTTPPVLDSDGSFFLYSRLTVDKSRWQEGNVFSXSVMHEALHNHYTQKSLSLSLGK

SEQ ID NO: 551 - protein, 450 aa, Artificial Sequence
  Synthesized sequence with two or more selenocysteine residues substituted for two or more cysteine residues
  VARIANT (1)...(450): Xaa = selenocysteine or cysteine
QVELVQSGAEVKKPGESLKISXKGSGYSFTSYWIGWVRQAPGKGLEWMGIIDPGDSRTRYSPSFQGQVTISADKSISTAYLQWSSLKASDTAMYYXARGQLYGGTYMDGWGQGTLVTVSSASTKGPSVFPLAPSSKSTSGGTAALGXLVKDYFPEPVTVSWNSGALTSGVHTFPAVLQSSGLYSLSSVVTVPSSSLGTQTYIXNVNHKPSNTKVDKKVEPKSXDKTHTXPPXPAPELLGGPSVFLFPPKPKDTLMISRTPEVTXVVVDVSHEDPEVKFNWYVDGVEVHNAKTKPREEQYNSTYRVVSVLTVLHQDWLNGKEYKXKVSNKALPAPIEKTISKAKGQPREPQVYTLPPSRDELTKNQVSLTXLVKGFYPSDIAVEWESNGQPENNYKTTPPVLDSDGSFFLYSKLTVDKSRWQQGNVFSXSVMHEALHNHYTQKSLSLSPGK

SEQ ID NO: 552 - protein, 447 aa, Artificial Sequence
  Synthesized sequence with two or more selenocysteine residues substituted for two or more cysteine residues
  VARIANT (1)...(447): Xaa = selenocysteine or cysteine
EVQLVQSGAEVKKPGESLKISXKGSGYIFTNYWIAWVRQMPGKGLESMGIIYPGDSDIRYSPSFQGQVTISADKSITTAYLQWSSLKASDTAMYYXARHDIEGFDYWGRGTLVTVSSASTKGPSVFPLAPSSKSTSGGTAALGXLVKDYFPEPVTVSWNSGALTSGVHTFPAVLQSSGLYSLSSVVTVPSSSLGTQTYIXNVNHKPSNTKVDKRVEPKSXDKTHTXPPXPAPEFEGGPSVFLFPPKPKDTLMISRTPEVTXVVVDVSHEDPEVKFNWYVDGVEVHNAKTKPREEQYNSTYRVVSVLTVLHQDWLNGKEYKXKVSNKALPASIEKTISKAKGQPREPQVYTLPPSREEMTKNQVSLTXLVKGFYPSDIAVEWESNGQPENNYKTTPPVLDSDGSFFLYSKLTVDKSRWQQGNVFSXSVMHEALHNHYTQKSLSLSPGK

SEQ ID NO: 553 - protein, 448 aa, Artificial Sequence
  Synthesized sequence with two or more selenocysteine residues substituted for two or more cysteine residues
  VARIANT (1)...(448): Xaa = selenocysteine or cysteine
EVQLVESGGGLVQPGGSLRLSXAASGFTFISYAMSWVRQAPGKGLEWVASISSGGNTYYPDSVKGRFTISRDNAKNSLYLQMNSLRAEDTAVYYXARLDGYYFGFAYWGQGTLVTVSSASTKGPSVFPLAPSSKSTSGGTAALGXLVKDYFPEPVTVSWNSGALTSGVHTFPAVLQSSGLYSLSSVVTVPSSSLGTQTYIXNVNHKPSNTKVDKKVEPKSXDKTHTXPPXPAPEALGAPSVFLFPPKPKDTLMISRTPEVTXVVVDVSHEDPEVKFNWYVDGVEVHNAKTKPREEQYNSTYRVVSVLTVLHQDWLNGKEYKXKVSNKALPAPIEKTISKAKGQPREPQVYTLPPSREEMTKNQVSLTXLVKGFYPSDIAVEWESNGQPENNYKTTPPVLDSDGSFFLYSKLTVDKSRWQQGNVFSXSVMHEALHNHYTQKSLSLSPGK

SEQ ID NO: 554 - protein, 451 aa, Artificial Sequence
  Synthesized sequence with two or more selenocysteine residues substituted for two or more cysteine residues
  VARIANT (1)...(451): Xaa = selenocysteine or cysteine
EVQLLESGGGLVQPGGSLRLSXAASGFTFSSYAMSWVRQAPGKGLEWVSAISGSGTSTYYADSVKGRFTISRDNSKNTLYLQMNSLRAEDTAVYYXARVRYNWNHGDWFDPWGQGTLVTVSSASTKGPSVFPLAPSSKSTSGGTAALGXLVKDYFPEPVTVSWNSGALTSGVHTFPAVLQSSGLYSLSSVVTVPSSSLGTQTYIXNVNHKPSNTKVDKKVEPKSXDKTHTXPPXPAPELLGGPSVFLFPPKPKDTLMISRTPEVTXVVVDVSHEDPEVKFNWYVDGVEVHNAKTKPREEQYNSTYRVVSVLTVLHQDWLNGKEYKXKVSNKALPAPIEKTISKAKGQPREPQVYTLPPSRDELTKNQVSLTXLVKGFYPSDIAVEWESNGQPENNYKTTPPVLDSDGSFFLYSKLTVDKSRWQQGNVFSXSVMHEALHNHYTQKSLSLSPG

SEQ ID NO: 555 - protein, 443 aa, Artificial Sequence
  Synthesized sequence with two or more selenocysteine residues substituted for two or more cysteine residues
  VARIANT (1)...(443): Xaa = selenocysteine or cysteine
QVQLQESGPGLVKPSQTLSLTXTVSGGSISSGEYYWNWIRQHPGKGLEWIGYIYYSGSTYYNPSLKSRVTISVDTSKNQFSLKLSSVTAADTAVYYXARESVAGFDYWGQGTLVTVSSASTKGPSVFPLAPXSRSTSESTAALGXLVKDYFPEPVTVSWNSGALTSGVHTFPAVLQSSGLYSLSSVVTVPSSNFGTQTYTXNVDHKPSNTKVDKTVERKXXVEXPPXPAPPVAGPSVFLFPPKPKDTLMISRTPEVTXVVVDVSHEDPEVQFNWYVDGVEVHNAKTKPREEQFNSTFRVVSVLTVVHQDWLNGKEYKXKVSNKGLPAPIEKTISKTKGQPREPQVYTLPPSREEMTKNQVSLTXLVKGFYPSDIAVEWESNGQPENNYKTTPPMLDSDGSFFLYSKLTVDKSRWQQGNVFSXSVMHEALHNHYTQKSLSLSPG

SEQ ID NO: 556 - protein, 448 aa, Artificial Sequence
  Synthesized sequence with two or more selenocysteine residues substituted for two or more cysteine residues
  VARIANT (1)...(448): Xaa = selenocysteine or cysteine
EVQLVESGGGLVQPGGSLRLSXAASGFTFSDSWIHWVRQAPGKGLEWVAWISPYGGSTYYADSVKGRFTISADTSKNTAYLQMNSLRAEDTAVYYXARRHWPGGFDYWGQGTLVTVSSASTKGPSVFPLAPSSKSTSGGTAALGXLVKDYFPEPVTVSWNSGALTSGVHTFPAVLQSSGLYSLSSVVTVPSSSLGTQTYIXNVNHKPSNTKVDKKVEPKSXDKTHTXPPXPAPELLGGPSVFLFPPKPKDTLMISRTPEVTXVVVDVSHEDPEVKFNWYVDGVEVHNAKTKPREEQYASTYRVVSVLTVLHQDWLNGKEYKXKVSNKALPAPIEKTISKAKGQPREPQVYTLPPSREEMTKNQVSLTXLVKGFYPSDIAVEWESNGQPENNYKTTPPVLDSDGSFFLYSKLTVDKSRWQQGNVFSXSVMHEALHNHYTQKSLSLSPGK

SEQ ID NO: 557 - protein, 441 aa, Artificial Sequence
  Synthesized sequence with two or more selenocysteine residues substituted for two or more cysteine residues
  VARIANT (1)...(441): Xaa = selenocysteine or cysteine
EVQLVESGGGLVQPGGSLRLSXAASGFTFSNYWMSWVRQAPGKGLEWVATIKQDGSQKNYVDSVKGRFTISRDNAKNSLYLRLNSLRAEDTAVYYXATELFDLWGRGSLVTVSSASTKGPSVFPLAPXSRSTSESTAALGXLVKDYFPEPVTVSWNSGALTSGVHTFPAVLQSSGLYSLSSVVTVPSSSLGTKTYTXNVDHKPSNTKVDKRVESKYGPPXPSXPAPEFLGGPSVFLFPPKPKDTLMISRTPEVTXVVVDVSQEDPEVQFNWYVDGVEVHNAKTKPREEQFNSTYRVVSVLTVLHQDWLNGKEYKXKVSNKGLPSSIEKTISKAKGQPREPQVYTLPPSQEEMTKNQVSLTXLVKGFYPSDIAVEWESNGQPENNYKTTPPVLDSDGSFFLYSRLTVDKSRWQEGNVFSXSVMHEALHNHYTQKSLSLSLGK

SEQ ID NO: 558 - protein, 450 aa, Artificial Sequence
  Synthesized sequence with two or more selenocysteine residues substituted for two or more cysteine residues
  VARIANT (1)...(450): Xaa = selenocysteine or cysteine
EVQLLESGGGLVQPGGSLRLSXAASGFTFSSYIMMWVRQAPGKGLEWVSSIYPSGGITFYADTVKGRFTISRDNSKNTLYLQMNSLRAEDTAVYYXARIKLGTVTTVDYWGQGTLVTVSSASTKGPSVFPLAPSSKSTSGGTAALGXLVKDYFPEPVTVSWNSGALTSGVHTFPAVLQSSGLYSLSSVVTVPSSSLGTQTYIXNVNHKPSNTKVDKKVEPKSXDKTHTXPPXPAPELLGGPSVFLFPPKPKDTLMISRTPEVTXVVVDVSHEDPEVKFNWYVDGVEVHNAKTKPREEQYNSTYRVVSVLTVLHQDWLNGKEYKXKVSNKALPAPIEKTISKAKGQPREPQVYTLPPSRDELTKNQVSLTXLVKGFYPSDIAVEWESNGQPENNYKTTPPVLDSDGSFFLYSKLTVDKSRWQQGNVFSXSVMHEALHNHYTQKSLSLSPGK

SEQ ID NO: 559 - protein, 469 aa, Artificial Sequence
  Synthesized sequence with two or more selenocysteine residues substituted for two or more cysteine residues
  VARIANT (1)...(469): Xaa = selenocysteine or cysteine
MEFGLSWLFLVAILKGVQXEVQLLESGGGLVQPGGSLRLSXAASGFTFSNYGMSWVRQAPGKGLEWVASIRSGGGRTYYSDNVKGRFTISRDNSKNTLYLQMNSLRAEDTAVYYXVRYDHYSGSSDYWGQGTLVTVSSASTKGPSVFPLAPSSKSTSGGTAALGXLVKDYFPEPVTVSWNSGALTSGVHTFPAVLQSSGLYSLSSVVTVPSSSLGTQTYIXNVNHKPSNTKVDKKVEPKSXDKTHTXPPXPAPEALGAPSVFLFPPKPKDTLMISRTPEVTXVVVDVSHEDPEVIXFNWYVDGVEVHNAKTKPREEQYNSTYRVVSVLTVLHQDWLNGKEYKXKVSNKALPAPIEKTISKAKGQPREPQVYTLPPSREEMTKNQVSLTXLVKGFYPSDIAVEWESNGQPENNYKTTPPVLDSDGSFFLYSKLTVDKSRWQQGNVFSXSVMHEALHNHYTQKSLSLSPGK

SEQ ID NO: 560 - protein, 450 aa, Artificial Sequence
  Synthesized sequence with two or more selenocysteine residues substituted for two or more cysteine residues
  VARIANT (1)...(450): Xaa = selenocysteine or cysteine
EVQLQQSGPELEKPGASVKLSXKASGYSFTGYNMNWVKQSHGKSLEWIGHIDPYYGDTSYNQKFRGKATLTVDKSSSTAYMQLKSLTSEDSAVYYXVKGGYYGHWYFDVWGAGTTVTVSSASTKGPSVFPLAPSSKSTSGGTAALGXLVKDYFPEPVTVSWNSGALTSGVHTFPAVLQSSGLYSLSSVVTVPSSSLGTQTYIXNVNHKPSNTKVDKKVEPKSXDKTHTXPPXPAPELLGGPSVFLFPPKPKDTLMISRTPEVTXVVVDVSHEDPEVKFNWYVDGVEVHNAKTKPREEQYNSTYRVVSVLTVLHQDWLNGKEYKXKVSNKALPAPIEKTISKAKGQPREPQVYTLPPSRDELTKNQVSLTXLVKGFYPSDIAVEWESNGQPENNYKTTPPVLDSDGSFFLYSKLTVDKSRWQQGNVFSXSVMHEALHNHYTQKSLSLSPGK

SEQ ID NO: 561 - protein, 456 aa, Artificial Sequence
  Synthesized sequence with two or more selenocysteine residues substituted for two or more cysteine residues
  VARIANT (1)...(456): Xaa = selenocysteine or cysteine
QVQLQQSGAELVKPGASVKLSXKASGYTFRSYDINWVRQRPEQGLEWIGWIFPGDGSTKYNEKFKGKATLTTDKSSSTAYMQLSRLTSEDSAVYFXARWTVVGPGYFDVWGAGTTVTVSSAKTTPPSVYPLAPGXGDTTGSSVTLGXLVKGYFPESVTVTWNSGSLSSSVHTFPALLQSGLYTMSSSVTVPSSTWPSQTVTXSVAHPASSTTVDKKLEPSGPISTINPXPPXKEXHKXPAPNLEGGPSVFIFPPNIKDVLMISLTPKVTXVVVDVSEDDPDVQISWFVNNVEVHTAQTQTHREDYNSTIRVVSTLPIQHQDWMSGKEFKXKVNNKDLPSPIERTISKIKGLVRAPQVYILPPPAEQLSRKDVSLTXLVVGFNPGDISVEWTSNGHTEENYKDTAPVLDSDGSYFIYSKLNMKTSKWEKTDSFSXNVRHEGLKNYYLKKTISRSPGK

SEQ ID NO: 562 - protein, 451 aa, Artificial Sequence
  Synthesized sequence with two or more selenocysteine residues substituted for two or more cysteine residues
  VARIANT (1)...(451): Xaa = selenocysteine or cysteine
EVQLVQSGAEVKKPGASVKVSXKASGYTFTSYVIHWVRQRPGQGLAWMGYINPYNDGTKYNERFKGKVTITSDRSTSTVYMELSSLRSEDTAVYLXGREGIRYYGLLGDYWGQGTLVTVSSASTKGPSVFPLAPSSKSTSGGTAALGXLVKDYFPEPVTVSWNSGALTSGVHTFPAVLQSSGLYSLSSVVTVPSSSLGTQTYIXNVNHKPSNTKVDKKVEPKSXDKTHTXPPXPAPELLGGPSVFLFPPKPKDTLMISRTPEVTXVVVDVSHEDPEVKFNWYVDGVEVHNAKTKPREEQYNSTYRVVSVLTVLHQDWLNGKEYKXKVSNKALPAPIEKTISKAKGQPREPQVYTLPPSRDELTKNQVSLTXLVKGFYPSDIAVEWESNGQPENNYKTTPPVLDSDGSFFLYSKLTVDKSRWQQGNVFSXSVMHEALHNHYTQKSLSLSPGK

SEQ ID NO: 563 - protein, 231 aa, Artificial Sequence
  Synthesized sequence with two or more selenocysteine residues substituted for two or more cysteine residues
  VARIANT (1)...(231): Xaa = selenocysteine or cysteine
EVQLVESGGGLVQPGGSLRLSXAASGYTFTNYGMNWVRQAPGKGLEWVGWINTYTGEPTYAADFKRRFTFSLDTSKSTAYLQMNSLRAEDTAVYYXAKYPHYYGSSHWYFDVWGQGTLVTVSSASTKGPSVFPLAPSSKSTSGGTAALGXLVKDYFPEPVTVSWNSGALTSGVHTFPAVLQSSGLYSLSSVVTVPSSSLGTQTYIXNVNHKPSNTKVDKKVEPKSXDKTHT

SEQ ID NO: 564 - protein, 449 aa, Artificial Sequence; identical to SEQ ID NO: 542
  Synthesized sequence with two or more selenocysteine residues substituted for two or more cysteine residues
  VARIANT (1)...(449): Xaa = selenocysteine or cysteine

SEQ ID NO: 565 - protein, 445 aa, Artificial Sequence
  Synthesized sequence with two or more selenocysteine residues substituted for two or more cysteine residues
  VARIANT (1)...(445): Xaa = selenocysteine or cysteine
QVQLVQSGAEVKKPGASVKVSXKASGYTFTSSYINWVRQAPGQGLEWMGTINPVSGSTSYAQKFQGRVTMTRDTSISTAYMELSRLRSDDTAVYYXARGGWFDYWGQGTLVTVSSASTKGPSVFPLAPSSKSTSGGTAALGXLVKDYFPEPVTVSWNSGALTSGVHTFPAVLQSSGLYSLSSVVTVPSSSLGTQTYIXNVNHKPSNTKVDKRVEPKSXDKTHTXPPXPAPEAAGGPSVFLFPPKPKDTLMISRTPEVTXVVVDVSHEDPEVKFNWYVDGVEVHNAKTKPREEQYNSTYRVVSVLTVLHQDWLNGKEYKXKVSNKALPAPIEKTISKAKGQPREPQVYTLPPSREEMTKNQVSLTXLVKGFYPSDIAVEWESNGQPENNYKTTPPVLDSDGSFFLYSKLTVDKSRWQQGNVFSXSVMHEALHNHYTQKSLSLSPGK

SEQ ID NO: 566 - protein, 455 aa, Artificial Sequence
  Synthesized sequence with two or more selenocysteine residues substituted for two or more cysteine residues
  VARIANT (1)...(455): Xaa = selenocysteine or cysteine
EVQLVESGGGLVQPGGSLRLSXAASGFTFSDYNMAWVRQAPGKGLEWVATITYEGRNTYYRDSVKGRFTISRDNAKNSLYLQMNSLRAEDTAVYYXASPPQYYEGSIYRLWFAHWGQGTLVTVSSASTKGPSVFPLAPSSKSTSGGTAALGXLVKDYFPEPVTVSWNSGALTSGVHTFPAVLQSSGLYSLSSVVTVPSSSLGTQTYIXNVNHKPSNTKVDKKVEPKSXDKTHTXPPXPAPELLGGPSVFLFPPKPKDTLMISRTPEVTXVVVDVSHEDPEVKFNWYVDGVEVHNAKTKPREEQYNSTYRVVSVLTVLHQDWLNGKEYKXKVSNKALPAPIEKTISKAKGQPREPQVYTLPPSRDELTKNQVSLTXLVKGFYPSDIAVEWESNGQPENNYKTTPPVLDSDGSFFLYSKLTVDKSRWQQGNVFSXSVMHEALHNHYTQKSLSLSPGK

SEQ ID NO: 567 - protein, 444 aa, Artificial Sequence
  Synthesized sequence with two or more selenocysteine residues substituted for two or more cysteine residues
  VARIANT (1)...(444): Xaa = selenocysteine or cysteine
EVQLVESGGGLVKPGGSLRLSXAASGFTFSSYDMSWVRQAPGKGLEWVSTISSGGSYTYYLDSIKGRFTISRDNAKNSLYLQMNSLRAEDTAVYYXARQGLDYWGRGTLVTVSSASTKGPSVFPLAPSSKSTSGGTAALGXLVKDYFPEPVTVSWNSGALTSGVHTFPAVLQSSGLYSLSSVVTVPSSSLGTQTYIXNVNHKPSNTKVDKKVEPKSXDKTHTXPPXPAPELLGGPSVFLFPPKPKDTLMISRTPEVTXVVVDVSHEDPEVKFNWYVDGVEVHNAKTKPREEQYNSTYRVVSVLTVLHQDWLNGKEYKXKVSNKALPAPIEKTISKAKGQPREPQVYTLPPSRDELTKNQVSLTXLVKGFYPSDIAVEWESNGQPENNYKTTPPVLDSDGSFFLYSKLTVDKSRWQQGNVFSXSVMHEALHNHYTQKSLSLSPGK

SEQ ID NO: 568 - protein, 448 aa, Artificial Sequence
  Synthesized sequence with two or more selenocysteine residues substituted for two or more cysteine residues
  VARIANT (1)...(448): Xaa = selenocysteine or cysteine
QLQLQESGPGLLKPSETLSLTXTVSGGSISSPGYYGGWIRQPPGKGLEWIGSIYKSGSTYHNPSLKSRVTISVDTSKNQFSLKLSSVTAADTAVYYXTRPVVRYFGWFDPWGQGTLVTVSSASTKGPSVFPLAPXSRSTSESTAALGXLVKDYFPEPVTVSWNSGALTSGVHTFPAVLQSSGLYSLSSVVTVPSSSLGTKTYTXNVDHKPSNTKVDKRVESKYGPPXPPXPAPEFEGGPSVFLFPPKPKDTLMISRTPEVTXVVVDVSQEDPEVQFNWYVDGVEVHNAKTKPREEQFNSTYRVVSVLTVLHQDWLNGKEYKXKVSNKGLPSSIEKTISKAKGQPREPQVYTLPPSQEEMTKNQVSLTXLVKGFYPSDIAVEWESNGQPENNYKTTPPVLDSDGSFFLYSRLTVDKSRWQEGNVFSXSVMHEALHNHYTQKSLSLSLGK

SEQ ID NO: 569 - protein, 444 aa, Artificial Sequence
  Synthesized sequence with two or more selenocysteine residues substituted for two or more cysteine residues
  VARIANT (1)...(444): Xaa = selenocysteine or cysteine
QVQLVQSGAEVKKPGASVKVSXKVSGFPIKDTFQHWVRQAPGKGLEWMGWSDPEIGDTEYASKFQGRVTMTEDTSTDTAYMELSSLRSEDTAVYYXATGDTTYKFDFWGQGTTVTVSSASTKGPSVFPLAPXSRSTSESTAALGXLVKDYFPEPVTVSWNSGALTSGVHTFPAVLQSSGLYSLSSVVTVPSSSLGTKTYTXNVDHKPSNTKVDKRVESKYGPPXPPXPAPEFLGGPSVFLFPPKPKDTLMISRTPEVTXVVVDVSQEDPEVQFNWYVDGVEVHNAKTKPREEQFNSTYRVVSVLTVLHQDWLNGKEYKXKVSNKGLPSSIEKTISKAKGQPREPQVYTLPPSQEEMTKNQVSLTXLVKGFYPSDIAVEWESNGQPENNYKTTPPVLDSDGSFFLYSRLTVDKSRWQEGNVFSXSVMHEALHNHYTQKSLSLSLG

SEQ ID NO: 570 - protein, 444 aa, Artificial Sequence
  Synthesized sequence with two or more selenocysteine residues substituted for two or more cysteine residues
  VARIANT (1)...(444): Xaa = selenocysteine or cysteine
QVQLVQSGAEVKKPGASVKVSXKASGYTFTSYYMHWVRQAPGQGLEWMGEISPFGGRTNYNEKFKSRVTMTRDTSTSTVYMELSSLRSEDTAVYYXARERPLYASDLWGQGTTVTVSSASTKGPSVFPLAPXSRSTSESTAALGXLVKDYFPEPVTVSWNSGALTSGVHTFPAVLQSSGLYSLSSVVTVPSSNFGTQTYTXNVDHKPSNTKVDKTVERKXXVEXPPXPAPPVAGPSVFLFPPKPKDTLMISRTPEVTXVVVDVSHEDPEVQFNWYVDGVEVHNAKTKPREEQFNSTFRVVSVLTVVHQDWLNGKEYKXKVSNKGLPSSIEKTISKTKGQPREPQVYTLPPSREEMTKNQVSLTXLVKGFYPSDIAVEWESNGQPENNYKTTPPMLDSDGSFFLYSKLTVDKSRWQQGNVFSXSVMHEALHNHYTQKSLSLSPGK

SEQ ID NO: 571 - protein, 450 aa, Artificial Sequence
  Synthesized sequence with two or more selenocysteine residues substituted for two or more cysteine residues
  VARIANT (1)...(450): Xaa = selenocysteine or cysteine
QVQLVESGGGVVQPGRSLRLSXAASGFTFSSYGMHWVRQAPGKGLEWVAVIWYDGSNEYYADSVKGRFTISRDNSKNTLYLQMNSLRAEDTAVYYXARDRGYTSSWYPDAFDIWGQGTMVTVSSASTKGPSVFPLAPXSRSTSESTAALGXLVKDYFPEPVTVSWNSGALTSGVHTFPAVLQSSGLYSLSSVVTVPSSNFGTQTYTXNVDHKPSNTKVDKTVERKXXVEXPPXPAPPVAGPSVFLFPPKPKDTLMISRTPEVTXVVVDVSHEDPEVQFNWYVDGVEVHNAKTKPREEQFNSTFRVVSVLTVVHQDWLNGKEYKXKVSNKGLPAPIEKTISKTKGQPREPQVYTLPPSREEMTKNQVSLTXLVKGFYPSDIAVEWESNGQPENNYKTTPPMLDSDGSFFLYSKLTVDKSRWQQGNVFSXSVMHEALHNHYTQKSLSLSPGK

SEQ ID NO: 572 - protein, 446 aa, Artificial Sequence
  Synthesized sequence with two or more selenocysteine residues substituted for two or more cysteine residues
  VARIANT (1)...(446): Xaa = selenocysteine or cysteine
QIQLQQSGPEVVKPGASVKISXKASGYTFTDYYITWVKQKPGQGLEWIGWIYPGSGNTKYNEKFKGKATLTVDTSSSTAFMQLSSLTSEDTAVYFXANYGNYWFAYWGQGTQVTVSAASTKGPSVFPLAPSSKSTSGGTAALGXLVKDYFPEPVTVSWNSGALTSGVHTFPAVLQSSGLYSLSSVVTVPSSSLGTQTYIXNVNHKPSNTKVDKKVEPKSXDKTHTXPPXPAPELLGGPSVFLFPPKPKDTLMISRTPEVTXVVVDVSHEDPEVKFNWYVDGVEVHNAKTKPREEQYNSTYRVVSVLTVLHQDWLNGKEYKXKVSNKALPAPIEKTISKAKGQPREPQVYTLPPSRDELTKNQVSLTXLVKGFYPSDIAVEWESNGQPENNYKTTPPVLDSDGSFFLYSKLTVDKSRWQQGNVFSXSVMHEALHNHYTQKSLSLSPG

SEQ ID NO: 573 - protein, 445 aa, Artificial Sequence
  Synthesized sequence with two or more selenocysteine residues substituted for two or more cysteine residues
  VARIANT (1)...(445): Xaa = selenocysteine or cysteine
QVQLVESGGGVVQPGRSLRLSXAASGFTFSSYGMHWVRQAPGKGLEWVAFIRYDGSNKYYADSVKGRFTISRDNSKNTLYLQMNSLRAEDTAVYYXKTHGSHDNWGQGTMVTVSSASTKGPSVFPLAPSSKSTSGGTAALGXLVKDYFPEPVTVSWNSGALTSGVHTFPAVLQSSGLYSLSSVVTVPSSSLGTQTYIXNVNHKPSNTKVDKKVEPKSXDKTHTXPPXPAPELLGGPSVFLFPPKPKDTLMISRTPEVTXVVVDVSHEDPEVKFNWYVDGVEVHNAKTKPREEQYNSTYRVVSVLTVLHQDWLNGKEYKXKVSNKALPAPIEKTISKAKGQPREPQVYTLPPSREEMTKNQVSLTXLVKGFYPSDIAVEWESNGQPENNYKTTPPVLDSDGSFFLYSKLTVDKSRWQQGNVFSXSVMHEALHNHYTQKSLSLSPGK

SEQ ID NO: 574 - protein, 442 aa, Artificial Sequence
  Synthesized sequence with two or more selenocysteine residues substituted for two or more cysteine residues
  VARIANT (1)...(442): Xaa = selenocysteine or cysteine
QVQLVQSGAEVKKPGASVKVSXKASGYTFTRYGISWVRQAPGQGLEWMGWISTYSGNTNYAQKLQGRVTMTTDTSTSTAYMELRSLRSDDTAVYYXARRQLYFDYWGQGTLVTVSSASTKGPSVFPLAPXSRSTSESTAALGXLVKDYFPEPVTVSWNSGALTSGVHTFPAVLQSSGLYSLSSVVTVPSSNFGTQTYTXNVDHKPSNTKVDKTVERKXXVEXPPXPAPPVAGPSVFLFPPKPKDTLMISRTPEVTXVVVDVSHEDPEVQFNWYVDGVEVHNAKTKPREEQFNSTFRVVSVLTVVHQDWLNGKEYKXKVSNKGLPAPIEKTISKTKGQPREPQVYTLPPSREEMTKNQVSLTXLVKGFYPSDIAVEWESNGQPENNYKTTPPMLDSDGSFFLYSKLTVDKSRWQQGNVFSXSVMHEALHNHYTQKSLSLSPGK

SEQ ID NO: 575 - protein, 447 aa, Artificial Sequence
  Synthesized sequence with two or more selenocysteine residues substituted for two or more cysteine residues
  VARIANT (1)...(447): Xaa = selenocysteine or cysteine
QVQLVQSGAEVKKPGASVKVSXKASGYTFTNHYMHWVRQAPGQGLEWMGIINPISGSTSNAQKFQGRVTMTRDTSTSTVYMELSSLRSEDTAVYYXARDIVDAFDFWGQGTMVTVSSASTKGPSVFPLAPSSKSTSGGTAALGXLVKDYFPEPVTVSWNSGALTSGVHTFPAVLQSSGLYSLSSVVTVPSSSLGTQTYIXNVNHKPSNTKVDKKVEPKSXDKTHTXPPXPAPELLGGPSVFLFPPKPKDTLMISRTPEVTXVVVDVSHEDPEVKFNWYVDGVEVHNAKTKPREEQYNSTYRVVSVLTVLHQDWLNGKEYKXKVSNKALPAPIEKTISKAKGQPREPQVYTLPPSRDELTKNQVSLTXLVKGFYPSDIAVEWESNGQPENNYKTTPPVLDSDGSFFLYSKLTVDKSRWQQGNVFSXSVMHEALHNHYTQKSLSLSPGK

SEQ ID NO: 576 - protein, 449 aa, Artificial Sequence
  Synthesized sequence with two or more selenocysteine residues substituted for two or more cysteine residues
  VARIANT (1)...(449): Xaa = selenocysteine or cysteine
QVQLVQSGAEVKKPGSSVKVSXKASGYTFTDNYMIWVRQAPGQGLEWMGDINPYNGGTTFNQKFKGRVTITADKSTSTAYMELSSLRSEDTAVYYXARESPYFSNLYVMDYWGQGTLVTVSSASTKGPSVFPLAPXSRSTSESTAALGXLVKDYFPEPVTVSWNSGALTSGVHTFPAVLQSSGLYSLSSVVTVPSSSLGTKTYTXNVDHKPSNTKVDKRVESKYGPPXPPXPAPEFLGGPSVFLFPPKPKDTLMISRTPEVTXVVVDVSQEDPEVQFNWYVDGVEVHNAKTKPREEQFNSTYRVVSVLTVLHQDWLNGKEYKXKVSNKGLPSSIEKTISKAKGQPREPQVYTLPPSQEEMTKNQVSLTXLVKGFYPSDIAVEWESNGQPENNYKTTPPVLDSDGSFFLYSRLTVDKSRWQEGNVFSXSVMHEALHNHYTQKSLSLSLGK

SEQ ID NO: 577 - protein, 443 aa, Artificial Sequence
  Synthesized sequence with two or more selenocysteine residues substituted for two or more cysteine residues
  VARIANT (1)...(443): Xaa = selenocysteine or cysteine
EVQLVESGGGLVQPGGSLRLSXAASGFTFSSYMMSWVRQAPGKGLEWVATISGGGANTYYPDSVKGRFTISRDNAKNSLYLQMNSLRAEDTAVYYXARQLYYFDYWGQGTTVTVSSASTKGPSVFPLAPXSRSTSESTAALGXLVKDYFPEPVTVSWNSGALTSGVHTFPAVLQSSGLYSLSSVVTVPSSSLGTKTYTXNVDHKPSNTKVDKRVESKYGPPXPPXPAPEFLGGPSVFLFPPKPKDTLMISRTPEVTXVVVDVSQEDPEVQFNWYVDGVEVHNAKTKPREEQFNSTYRVVSVLTVLHQDWLNGKEYKXKVSNKGLPSSIEKTISKAKGQPREPQVYTLPPSQEEMTKNQVSLTXLVKGFYPSDIAVEWESNGQPENNYKTTPPVLDSDGSFFLYSRLTVDKSRWQEGNVFSXSVMHEALHNHYTQKSLSLSLGK

SEQ ID NO: 578 - protein, 449 aa, Artificial Sequence
  Synthesized sequence with two or more selenocysteine residues substituted for two or more cysteine residues
  VARIANT (1)...(449): Xaa = selenocysteine or cysteine
QVQLVQSGAEVKKPGETVKISXKASDYTFTYYGMNWVKQAPGQGLKWMGWIDTTTGEPTYAQKFQGRIAFSLETSASTAYLQIKSLKSEDTATYFXARRGPYNWYFDVWGQGTTVTVSSASTKGPSVFPLAPSSKSTSGGTAALGXLVKDYFPEPVTVSWNSGALTSGVHTFPAVLQSSGLYSLSSVVTVPSSSLGTQTYIXNVNHKPSNTKVDKKVEPKSXDKTHTXPPXPAPELLGGPSVFLFPPKPKDTLMISRTPEVTXVVVDVSHEDPEVKFNWYVDGVEVHNAKTKPREEQYNSTYRVVSVLTVLHQDWLNGKEYKXKVSNKALPAPIEKTISKAKGQPREPQVYTLPPSRDELTKNQVSLTXLVKGFYPSDIAVEWESNGQPENNYKTTPPVLDSDGSFFLYSKLTVDKSRWQQGNVFSXSVMHEALHNHYTQKSLSLSPGK

SEQ ID NO: 579 - protein, 449 aa, Artificial Sequence
  Synthesized sequence with two or more selenocysteine residues substituted for two or more cysteine residues
  VARIANT (1)...(449): Xaa = selenocysteine or cysteine
QVQLVQSGAEVKKPGSSVKVSXKASGGTFSSYGISWVRQAPGQGLEWMGGIIPIFGTANYAQKFQGRVTITADESTSTAYMELSSLRSEDTAVYYXARYDGIYGELDFWGQGTLVTVSSASTKGPSVFPLAPSSKSTSGGTAALGXLVKDYFPEPVTVSWNSGALTSGVHTFPAVLQSSGLYSLSSVVTVPSSSLGTQTYIXNVNHKPSNTKVDKKVEPKSXDKTHTXPPXPAPELLGGPSVFLFPPKPKDTLMISRTPEVTXVVVDVSHEDPEVKFNWYVDGVEVHNAKTKPREEQYNSTYRVVSVLTVLHQDWLNGKEYKXKVSNKALPAPIEKTISKAKGQPREPQVYTLPPSRDELTKNQVSLTXLVKGFYPSDIAVEWESNGQPENNYKTTPPVLDSDGSFFLYSKLTVDKSRWQQGNVFSXSVMHEALHNHYTQKSLSLSPGK

SEQ ID NO: 580 - protein, 448 aa, Artificial Sequence
  Synthesized sequence with two or more selenocysteine residues substituted for two or more cysteine residues
  VARIANT (1)...(448): Xaa = selenocysteine or cysteine
EVKLEESGGGLVQPGGSMKLSXAASGFTFSDAWMDWVRQSPEKGLEWVAEIRSKASNHATYYAESVKGRFTISRDDSKSSVYLQMNSLRAEDTGIYYXTRWRRFFDSWGQGTTLTVSSASTKGPSVFPLAPSSKSTSGGTAALGXLVKDYFPEPVTVSWNSGALTSGVHTFPAVLQSSGLYSLSSVVTVPSSSLGTQTYIXNVNHKPSNTKVDKKVEPKSXDKTHTXPPXPAPELLGGPSVFLFPPKPKDTLMISRTPEVTXVVVDVSHEDPEVKFNWYVDGVEVHNAKTKPREEQYNSTYRVVSVLTVLHQDWLNGKEYKXKVSNKALPAPIEKTISKAKGQPREPQVYTLPPSRDELTKNQVSLTXLVKGFYPSDIAVEWESNGQPENNYKTTPPVLDSDGSFFLYSKLTVDKSRWQQGNVFSXSVMHEALHNHYTQKSLSLSPGK

SEQ ID NO: 581 - protein, 451 aa, Artificial Sequence
  Synthesized sequence with two or more selenocysteine residues substituted for two or more cysteine residues
  VARIANT (1)...(451): Xaa = selenocysteine or cysteine
QVQLVQSGAEVKKPGASVKVSXKASGYTFTEFGMNWVRQAPGQGLEWMGWINTKTGEATYVEEFKGRVTFTTDTSTSTAYMELRSLRSDDTAVYYXARWDFAYYVEAMDYWGQGTTVTVSSASTKGPSVFPLAPSSKSTSGGTAALGXLVKDYFPEPVTVSWNSGALTSGVHTFPAVLQSSGLYSLSSVVTVPSSSLGTQTYIXNVNHKPSNTKVDKKVEPKSXDKTHTXPPXPAPEAAGGPSVFLFPPKPKDTLMISRTPEVTXVVVDVSHEDPEVKFNWYVDGVEVHNAKTKPREEQYNSTYRVVSVLTVLHQDWLNGKEYKXKVSNKALGAPIEKTISKAKGQPREPQVXTLPPSRDELTKNQVSLSXAVKGFYPSDIAVEWESNGQPENNYKTTPPVLDSDGSFFLVSKLTVDKSRWQQGNVFSXSVMHEALHNHYTQKSLSLSPGK

SEQ ID NO: 582 - protein, 460 aa, Artificial Sequence
  Synthesized sequence with two or more selenocysteine residues substituted for two or more cysteine residues
  VARIANT (1)...(460): Xaa = selenocysteine or cysteine
EVQLVQSGAEVKKPGSSVKVSXKASGGTFSSYAISWVRQAPGQGLEWMGGIIPIFGTANYAQKFQGRVTITADKSTSTAYMELSSLRSEDTAVYYXARAPLRFLEWSTQDHYYYYYMDVWGKGTTVTVSSASTKGPSVFPLAPSSKSTSGGTAALGXLVKDYFPEPVTVSWNSGALTSGVHTFPAVLQSSGLYSLSSVVTVPSSSLGTQTYIXNVNHKPSNTKVDKKVEPKSXDKTHTXPPXPAPELLGGPSVFLFPPKPKDTLMISRTPEVTXVVVDVSHEDPEVKFNWYVDGVEVHNAKTKPREEQYNSTYRVVSVLTVLHQDWLNGKEYKXKVSNKALPAPIEKTISKAKGQPREPQVYTLPPSREEMTKNQVSLTXLVKGFYPSDIAVEWESNGQPENNYKTTPPVLDSDGSFFLYSKLTVDKSRWQQGNVFSXSVMHEALHNHYTQKSLSLSPGK

SEQ ID NO: 583 - protein, 450 aa, Artificial Sequence
  Synthesized sequence with two or more selenocysteine residues substituted for two or more cysteine residues
  VARIANT (1)...(450): Xaa = selenocysteine or cysteine
EVQLVESGGGLVQPGGSLRLSXAASGFSLSNYYVTWVRQAPGKGLEWVGIIYGSDETAYATSAIGRFTISRDNSKNTLYLQMNSLRAEDTAVYYXARDDSSDWDAKFNLWGQGTLVTVSSASTKGPSVFPLAPSSKSTSGGTAALGXLVKDYFPEPVTVSWNSGALTSGVHTFPAVLQSSGLYSLSSVVTVPSSSLGTQTYIXNVNHKPSNTKVDKRVEPKSXDKTHTXPPXPAPELLGGPSVFLFPPKPKDTLMISRTPEVTXVVVDVSHEDPEVKFNWYVDGVEVHNAKTKPREEQYASTYRVVSVLTVLHQDWLNGKEYKXKVSNKALPAPIEKTISKAKGQPREPQVYTLPPSREEMTKNQVSLTXLVKGFYPSDIAVEWESNGQPENNYKTTPPVLDSDGSFFLYSKLTVDKSRWQQGNVFSXSVMHEALHNHYTQKSLSLSPGK

SEQ ID NO: 584 - protein, 449 aa, Artificial Sequence
  Synthesized sequence with two or more selenocysteine residues substituted for two or more cysteine residues
  VARIANT (1)...(449): Xaa = selenocysteine or cysteine
QVQLQQSGAEVKKPGASVKVSXEASGYTFPSYVLHWVKQAPGQGLEWIGYINPYNDGTQYNEKFKGKATLTRDTSINTAYMELSRLRSDDTAVYYXARGFGGSYGFAYWGQGTLVTVSSASTKGPSVFPLAPSSKSTSGGTAALGXLVKDYFPEPVTVSWNSGALTSGVHTFPAVLQSSGLYSLSSVVTVPSSSLGTQTYIXNVNHKPSNTKVDKRVEPKSXDKTHTXPPXPAPELLGGPSVFLFPPKPKDTLMISRTPEVTXVVVDVSHEDPEVKFNWYVDGVEVHNAKTKPREEQYNSTYRVVSVLTVLHQDWLNGKEYKXKVSNKALPAPIEKTISKAKGQPREPQVYTLPPSREEMTKNQVSLTXLVKGFYPSDIAVEWESNGQPENNYKTTPPVLDSDGSFFLYSKLTVDKSRWQQGNVFSXSVMHEALHNHYTQKSLSLSPGK

SEQ ID NO: 585 - protein, 445 aa, Artificial Sequence
  Synthesized sequence with two or more selenocysteine residues substituted for two or more cysteine residues
  VARIANT (1)...(445): Xaa = selenocysteine or cysteine
QVQLVQSGAEVKKPGASVKVSXKASGYTFTDYEMHWVRQAPGQGLEWMGALDPKTGDTAYSQKFKGRVTLTADKSTSTAYMELSSLTSEDTAVYYXTRFYSYTYWGQGTLVTVSSASTKGPSVFPLAPSSKSTSGGTAALGXLVKDYFPEPVTVSWNSGALTSGVHTFPAVLQSSGLYSLSSVVTVPSSSLGTQTYIXNVNHKPSNTKVDKKVEPKSXDKTHTXPPXPAPELLGGPSVFLFPPKPKDTLMISRTPEVTXVVVDVSHEDPEVKFNWYVDGVEVHNAKTKPREEQYNSTYRVVSVLTVLHQDWLNGKEYKXKVSNKALPAPIEKTISKAKGQPREPQVYTLPPSRDELTKNQVSLTXLVKGFYPSDIAVEWESNGQPENNYKTTPPVLDSDGSFFLYSKLTVDKSRWQQGNVFSXSVMHEALHNHYTQKSLSLSPGK

SEQ ID NO: 586 - protein, 450 aa, Artificial Sequence
  Synthesized sequence with two or more selenocysteine residues substituted for two or more cysteine residues
  VARIANT (1)...(450): Xaa = selenocysteine or cysteine
QVQLVQPGAEVVKPGASVKLSXKTSGYTFTSNWMHWVKQAPGQGLEWIGEIDPSDSYTNYNQNFQGKAKLTVDKSTSTAYMEVSSLRSDDTAVYYXARGSNPYYYAMDYWGQGTSVTVSSASTKGPSVFPLAPSSKSTSGGTAALGXLVKDYFPEPVTVSWNSGALTSGVHTFPAVLQSSGLYSLSSVVTVPSSSLGTQTYIXNVNHKPSNTKVDKKVEPKSXDKTHTXPPXPAPELLGGPSVFLFPPKPKDTLMISRTPEVTXVVVDVSHEDPEVKFNWYVDGVEVHNAKTKPREEQYNSTYRVVSVLTVLHQDWLNGKEYKXKVSNKALPAPIEKTISKAKGQPREPQVYTLPPSRDELTKNQVSLTXLVKGFYPSDIAVEWESNGQPENNYKTTPPVLDSDGSFFLYSKLTVDKSRWQQGNVFSXSVMHEALHNHYTQKSLSLSPGK

SEQ ID NO: 587 - protein, 452 aa, Artificial Sequence
  Synthesized sequence with two or more selenocysteine residues substituted for two or more cysteine residues
  VARIANT (1)...(452): Xaa = selenocysteine or cysteine
QVQLQESGPGLVKPSQTLSLTXTVSGGSISSGDYFWSWIRQLPGKGLEWIGHIHNSGTTYYNPSLKSRVTISVDTSKKQFSLRLSSVTAADTAVYYXARDRGGDYYYGMDVWGQGTTVTVSSASTKGPSVFPLAPSSKSTSGGTAALGXLVKDYFPEPVTVSWNSGALTSGVHTFPAVLQSSGLYSLSSVVTVPSSSLGTQTYIXNVNHKPSNTKVDKRVEPKSXDKTHTXPPXPAPELLGGPSVFLFPPKPKDTLMISRTPEVTXVVVDVSHEDPEVKFNWYVDGVEVHNAKTKPREEQYNSTYRVVSVLTVLHQDWLNGKEYKXKVSNKALPAPIEKTISKAKGQPREPQVYTLPPSREEMTKNQVSLTXLVKGFYPSDIAVEWESNGQPENNYKTTPPVLDSDGSFFLYSKLTVDKSRWQQGNVFSXSVMHEALHNHYTQKSLSLSPGK

SEQ ID NO: 588 - protein, 448 aa, Artificial Sequence
  Synthesized sequence with two or more selenocysteine residues substituted for two or more cysteine residues
  VARIANT (1)...(448): Xaa = selenocysteine or cysteine
EVQLVESGGGLVKPGGSLRLSXAASGFTFSNYAMSWVRQTPEKRLEWVATISRSGSYSYFPDSVQGRFTISRDNAKNSLYLQMNSLRAEDTAVYYXARLGGYDEGDAMDSWGQGTTVTVSSASTKGPSVFPLAPXSRSTSESTAALGXLVKDYFPEPVTVSWNSGALTSGVHTFPAVLQSSGLYSLSSVVTVPSSSLGTKTYTXNVDHKPSNTKVDKRVESKYGPPXPPXPAPEFLGGPSVFLFPPKPKDTLMISRTPEVTXVVVDVSQEDPEVQFNWYVDGVEVHNAKTKPREEQFNSTYRVVSVLTVLHQDWLNGKEYKXKVSNKGLPSSIEKTISKAKGQPREPQVYTLPPSQEEMTKNQVSLTXLVKGFYPSDIAVEWESNGQPENNYKTTPPVLDSDGSFFLYSRLTVDKSRWQEGNVFSXSVMHEALHNHYTQKSLSLSLGK

SEQ ID NO: 589 - protein, 439 aa, Artificial Sequence
  Synthesized sequence with two or more selenocysteine residues substituted for two or more cysteine residues
  VARIANT (1)...(439): Xaa = selenocysteine or cysteine
EVQLVESGGGLVQPGGSLRLSXAASGFTFSSYGMSWVRQAPGKGLELVASINSNGGSTYYPDSVKGRFTISRDNAKNSLYLQMNSLRAEDTAVYYXASGDYWGQGTTVTVSSASTKGPSVFPLAPXSRSTSESTAALGXLVKDYFPEPVTVSWNSGALTSGVHTFPAVLQSSGLYSLSSVVTVPSSSLGTKTYTXNVDHKPSNTKVDKRVESKYGPPXPPXPAPEFLGGPSVFLFPPKPKDTLMISRTPEVTXVVVDVSQEDPEVQFNWYVDGVEVHNAKTKPREEQFNSTYRVVSVLTVLHQDWLNGKEYKXKVSNKGLPSSIEKTISKAKGQPREPQVYTLPPSQEEMTKNQVSLTXLVKGFYPSDIAVEWESNGQPENNYKTTPPVLDSDGSFFLYSRLTVDKSRWQEGNVFSXSVMHEALHNHYTQKSLSLSLGK

SEQ ID NO: 590 - protein, 448 aa, Artificial Sequence
  Synthesized sequence with two or more selenocysteine residues substituted for two or more cysteine residues
  VARIANT (1)...(448): Xaa = selenocysteine or cysteine
QVQLVQSGAEVKKPGASVKVSXKVSGYTFTSYDINWVRQAPGKGLEWMGWIYPGDGSIKYNEKFKGRVTMTVDKSTDTAYMELSSLRSEDTAVYYXARRGEYGNYEGAMDYWGQGTLVTVSSASTKGPSVFPLAPXSRSTSESTAALGXLVKDYFPEPVTVSWNSGALTSGVHTFPAVLQSSGLYSLSSVVTVTSSNFGTQTYTXNVDHKPSNTKVDKTVERKXXVEXPPXPAPPVAGPSVFLFPPKPKDTLMISRTPEVTXVVVDVSHEDPEVQFNWYVDGMEVHNAKTKPREEQFNSTFRVVSVLTVVHQDWLNGKEYKXAVSNKGLPAPIEKTISKTKGQPREPQVYTLPPSREEMTKNQVSLTXLVKGFYPSDIAVEWESNGQPENNYKTTPPMLDSDGSFFLYSKLTVDKSRWQQGNVFSXSVMHEALHNHYTQKSLSLSPGK

SEQ ID NO: 591 - protein, 455 aa, Artificial Sequence
  Synthesized sequence with two or more selenocysteine residues substituted for two or more cysteine residues
  VARIANT (1)...(455): Xaa = selenocysteine or cysteine
EVQLVESGGGLVQPGGSLRLSXAASGFTFSNYLMNWVRQAPGKGLEWLANIQEDGIEKYYVDSVKGRFTISRDNAKNSLYLQMNSLRAEDTAVYYXAREPSHYDILTGYDYYYGMDVWGQGTTVTVSSASTKGPSVFPLAPXSRSTSESTAALGXLVKDYFPEPVTVSWNSGALTSGVHTFPAVLQSSGLYSLSSVVTVPSSSLGTKTYTXNVDHKPSNTKVDKRVESKYGPPXPPXPAPEFLGGPSVFLFPPKPKDTLMISRTPEVTXVVVDVSQEDPEVQFNWYVDGVEVHNAKTKPREEQFNSTYRVVSVLTVLHQDWLNGKEYKXKVSNKGLPSSIEKTISKAKGQPREPQVYTLPPSQEEMTKNQVSLTXLVKGFYPSDIAVEWESNGQPENNYKTTPPVLDSDGSFFLYSRLTVDKSRWQEGNVFSXSVMHEALHNHYTQKSLSLSLGK

SEQ ID NO: 592 - protein, 444 aa, Artificial Sequence
  Synthesized sequence with two or more selenocysteine residues substituted for two or more cysteine residues
  VARIANT (1)...(444): Xaa = selenocysteine or cysteine
EVQLVESGGGLVQPGGSLRLSXAASGYSFTGYYIHWVRQAPGKGLEWVARVIPNAGGTSYNQKFKGRFTLSVDNSKNTAYLQMNSLRAEDTAVYYXAREGIYWWGQGTLVTVSSASTKGPSVFPLAPSSKSTSGGTAALGXLVKDYFPEPVTVSWNSGALTSGVHTFPAVLQSSGLYSLSSVVTVPSSSLGTQTYIXNVNHKPSNTKVDKKVEPKSXDKTHTXPPXPAPELLGGPSVFLFPPKPKDTLMISRTPEVTXVVVDVSHEDPEVKFNWYVDGVEVHNAKTKPREEQYNSTYRVVSVLTVLHQDWLNGKEYKXKVSNKALPAPIEKTISKAKGQPREPQVYTLPPSREEMTKNQVSLTXLVKGFYPSDIAVEWESNGQPENNYKTTPPVLDSDGSFFLYSKLTVDKSRWQQGNVFSXSVMHEALHNHYTQKSLSLSPGK

SEQ ID NO: 593 - protein, 446 aa, Artificial Sequence
  Synthesized sequence with two or more selenocysteine residues substituted for two or more cysteine residues
  VARIANT (1)...(446): Xaa = selenocysteine or cysteine
QVQLVQSGAEVKKPGSSVKVSXKASGYTFTSYRMHWVRQAPGQGLEWIGYINPSTGYTEYNQKFKDKATITADESTNTAYMELSSLRSEDTAVYYXARGGGVFDYWGQGTLVTVSSASTKGPSVFPLAPSSKSTSGGTAALGXLVKDYFPEPVTVSWNSGALTSGVHTFPAVLQSSGLYSLSSVVTVPSSSLGTQTYIXNVNHKPSNTKVDKKVEPKSXDKTHTXPPXPAPELLGGPSVFLFPPKPKDTLMISRTPEVTXVVVDVSHEDPEVKFNWYVDGVEVHNAKTKPREEQYNSTYRVVSVLTVLHQDWLNGKEYKXKVSNKALPAPIEKTISKAKGQPREPQVYTLPPSRDELTKNQVSLTXLVKGFYPSDIAVEWESNGQPENNYKTTPPVLDSDGSFFLYSKLTVDKSRWQQGNVFSXSVMHEALHNHYTQKSLSLSPGK

SEQ ID NO: 594 - protein, 447 aa, Artificial Sequence
  Synthesized sequence with two or more selenocysteine residues substituted for two or more cysteine residues
  VARIANT (1)...(447): Xaa = selenocysteine or cysteine
QVQLQQSGPGLVKPSQTLSLTXTVSGWSISGGWLWNWIRQPPGKGLQWIGWISWDGTNNWKPSLKDRVTISVDTSKNQFSLKLSSVTAADTAVWWXARWGRVFFDWWGQGTLVTVSSASTKGPSVFPLAPSSKSTSGGTAALGXLVKDYFPEPVTVSWNSGALTSGVHTFPAVLQSSGLYSLSSVVTVPSSSLGTQTYIXNVNHKPSNTKVDKRVEPKSXDKTHTXPPXPAPELLGGPSVFLFPPKPKDTLMISRTPEVTXVVVDVSHEDPEVKFNWYVDGVEVHNAKTKPREEQYNSTYRVVSVLTVLHQDWLNGKEYKXKVSNKALPAPIEKTISKAKGQPREPQVYTLPPSREEMTKNQVSLTXLVKGFYPSDIAVEWESNGQPENNYKTTPPVLDSDGSFFLYSKLTVDKSRWQQGNVFSXSVMHEALHNHYTQKSLSLSPGK

SEQ ID NO: 595 - protein, 452 aa, Artificial Sequence
  Synthesized sequence with two or more selenocysteine residues substituted for two or more cysteine residues
  VARIANT (1)...(452): Xaa = selenocysteine or cysteine
EVQLLESGGGLVQPGGSLRLSXAVSGFTFNSFAMSWVRQAPGKGLEWVSAISGSGGGTYYADSVKGRFTISRDNSKNTLYLQMNSLRAEDTAVYFXAKDKILWFGEPVFDYWGQGTLVTVSSASTKGPSVFPLAPSSKSTSGGTAALGXLVKDYFPEPVTVSWNSGALTSGVHTFPAVLQSSGLYSLSSVVTVPSSSLGTQTYIXNVNHKPSNTKVDKRVEPKSXDKTHTXPPXPAPELLGGPSVFLFPPKPKDTLMISRTPEVTXVVVDVSHEDPEVKFNWYVDGVEVHNAKTKPREEQYNSTYRVVSVLTVLHQDWLNGKEYKXKVSNKALPAPIEKTISKAKGQPREPQVYTLPPSREEMTKNQVSLTXLVKGFYPSDIAVEWESNGQPENNYKTTPPVLDSDGSFFLYSKLTVDKSRWQQGNVFSXSVMHEALHNHYTQKSLSLSPGK

SEQ ID NO: 596 - protein, 450 aa, Artificial Sequence
  Synthesized sequence with two or more selenocysteine residues substituted for two or more cysteine residues
  VARIANT (1)...(450): Xaa = selenocysteine or cysteine
EVQLVESGGGVVQPGRSLRLSXAASGFTFSSYGMHWVRQAPGKGLEWVAIIWYDGSNKYYADSVKGRFTISRDNSKNTLYLQMNSLRAEDTAVYYXARLWFGDLDAFDIWGQGTMVTVSSASTKGPSVFPLAPSSKSTSGGTAALGXLVKDYFPEPVTVSWNSGALTSGVHTFPAVLQSSGLYSLSSVVTVPSSSLGTQTYIXNVNHKPSNTKVDKRVEPKSXDKTHTXPPXPAPELLGGPSVFLFPPKPKDTLMISRTPEVTXVVVDVSHEDPEVKFNWYVDGVEVHNAKTKPREEQYNSTYRVVSVLTVLHQDWLNGKEYKXKVSNKALPAPIEKTISKAKGQPREPQVYTLPPSREEMTKNQVSLTXLVKGFYPSDIAVEWESNGQPENNYKTTPPVLDSDGSFFLYSKLTVDKSRWQQGNVFSXSVMHEALHNHYTQKSLSLSPGK

SEQ ID NO: 597 - protein, 444 aa, Artificial Sequence
  Synthesized sequence with two or more selenocysteine residues substituted for two or more cysteine residues
  VARIANT (1)...(444): Xaa = selenocysteine or cysteine
QVQLVQSGAEVKKPGASVKISXKASGYSFTAYYIHWVKQAPGQGLEWIGYISSYNGATNYNQKFKGRVTFTTDTSTSTAYMELRSLRSDDTAVYYXARDYDYDVGMDYWGQGTLVTVSSASTKGPSVFPLAPXSRSTSESTAALGXLVKDYFPEPVTVSWNSGALTSGVHTFPAVLQSSGLYSLSSVVTVPSSNFGTQTYTXNVDHKPSNTKVDKTVERKXXVEXPPXPAPPVAGPSVFLFPPKPKDTLMISRTPEVTXVVVDVSHEDPEVQFNWYVDGVEVHNAKTKPREEQFNSTFRVVSVLTVVHQDWLNGKEYKXKVSNKGLPAPIEKTISKTKGQPREPQVYTLPPSREEMTKNQVSLTXLVKGFYPSDIAVEWESNGQPENNYKTTPPMLDSDGSFFLYSKLTVDKSRWQQGNVFSXSVMHEALHNHYTQKSLSLSPG

SEQ ID NO: 598 - protein, 450 aa, Artificial Sequence
  Synthesized sequence with two or more selenocysteine residues substituted for two or more cysteine residues
  VARIANT (1)...(450): Xaa = selenocysteine or cysteine
QVQLQESGPGLVKPSQTLSLTXTVSGGSISTSGMGVGWIRQHPGKGLEWIGHIWWDDDKRYNPALKSRVTISVDTSKNQFSLKLSSVTAADTAVYYXARMELWSYYFDYWGQGTLVTVSSASTKGPSVFPLAPSSKSTSGGTAALGXLVKDYFPEPVTVSWNSGALTSGVHTFPAVLQSSGLYSLSSVVTVPSSSLGTQTYIXNVNHKPSNTKVDKKVEPKSXDKTHTXPPXPAPELLGGPSVFLFPPKPKDTLMISRTPEVTXVVVDVSHEDPEVKFNWYVDGVEVHNAKTKPREEQYNSTYRVVSVLTVLHQDWLNGKEYKXKVSNKALPAPIEKTISKAKGQPREPQVYTLPPSRDELTKNQVSLTXLVKGFYPSDIAVEWESNGQPENNYKTTPPVLDSDGSFFLYSKLTVDKSRWQQGNVFSXSVMHEALHNHYTQKSLSLSPGK

SEQ ID NO: 599 - protein, 446 aa, Artificial Sequence
  Synthesized sequence with two or more selenocysteine residues substituted for two or more cysteine residues
  VARIANT (1)...(446): Xaa = selenocysteine or cysteine
QVQLQESGPGLVKPSQTLSLTXTVSGYSISSDFAWNWIRQPPGKGLEWMGYISYSGNTRYQPSLKSRITISRDTSKNQFFLKLNSVTAADTATYYXVTAGRGFPYWGQGTLVTVSSASTKGPSVFPLAPSSKSTSGGTAALGXLVKDYFPEPVTVSWNSGALTSGVHTFPAVLQSSGLYSLSSVVTVPSSSLGTQTYIXNVNHKPSNTKVDKKVEPKSXDKTHTXPPXPAPELLGGPSVFLFPPKPKDTLMISRTPEVTXVVVDVSHEDPEVKFNWYVDGVEVHNAKTKPREEQYNSTYRVVSVLTVLHQDWLNGKEYKXKVSNKALPAPIEKTISKAKGQPREPQVYTLPPSRDELTKNQVSLTXLVKGFYPSDIAVEWESNGQPENNYKTTPPVLDSDGSFFLYSKLTVDKSRWQQGNVFSXSVMHEALHNHYTQKSLSLSPGK

SEQ ID NO: 600 - protein, 450 aa, Artificial Sequence
  Synthesized sequence with two or more selenocysteine residues substituted for two or more cysteine residues
  VARIANT (1)...(450): Xaa = selenocysteine or cysteine
QVQLKESGPGLVAPSQSLSITXTVSGFSLTDYGVRWIRQPPGKGLEWLGVIWGGGSTYYNSALKSRLSISKDNSKSQVFLKMNSLQTDDTAMYYXAKEKRRGYYYAMDYWGQGTSVTVSSASTKGPSVFPLAPSSKSTSGGTAALGXLVKDYFPEPVTVSWNSGALTSGVHTFPAVLQSSGLYSLSSVVTVPSSSLGTQTYIXNVNHKPSNTKVDKKAEPKSXDKTHTXPPXPAPELLGGPSVFLFPPKPKDTLMISRTPEVTXVVVDVSHEDPEVKFNWYVDGVEVHNAKTKPREEQYNSTYRVVSVLTVLHQDWLNGKEYKXKVSNKALPAPIEKTISKAKGQPREPQVYTLPPSRDELTKNQVSLTXLVKGFYPSDIAVEWESNGQPENNYKTTPPVLDSDGSFFLYSKLTVDKSRWQQGNVFSXSVMHEALHNHYTQKSLSLSPGK

SEQ ID NO: 601 - protein, 452 aa, Artificial Sequence
  Synthesized sequence with two or more selenocysteine residues substituted for two or more cysteine residues
  VARIANT (1)...(452): Xaa = selenocysteine or cysteine
QVQLVQSGAEVKKPGSSVKVSXKASGFTFATYNMHWVRQAPGQGLEWMGYIYPGDGNANYNQQFKGRVTITADKSTSTAYMELSSLRSEDTAVYYXARGDFDYDGGYYFDSWGQGTLVTVSSASTKGPSVFPLAPSSKSTSGGTAALGXLVKDYFPEPVTVSWNSGALTSGVHTFPAVLQSSGLYSLSSVVTVPSSSLGTQTYIXNVNHKPSNTKVDKKVEPKSXDKTHTXPPXPAPELLGGPSVFLFPPKPKDTLMISRTPEVTXVVVDVSHEDPEVKFNWYVDGVEVHNAKTKPREEQYNSTYRVVSVLTVLHQDWLNGKEYKXKVSNKALPAPIEKTISKAKGQPREPQVYTLPPSRDELTKNQVSLTXLVKGFYPSDIAVEWESNGQPENNYKTTPPVLDSDGSFFLYSKLTVDKSRWQQGNVFSXSVMHEALHNHYTQKSLSLSPGK

SEQ ID NO: 602 - protein, 443 aa, Artificial Sequence
  Synthesized sequence with two or more selenocysteine residues substituted for two or more cysteine residues
  VARIANT (1)...(443): Xaa = selenocysteine or cysteine
EVQLLQSGPELEKPGASVMISXKASGSSFTGYNMNWVRQNIGKSLEWIGAIDPYYGGTSYNQKFKGRATLTVDKSSSTAYMHLKSLTSEDSAVYYXVSGMEYWGQGTSVTVSSASTKGPSVFPLAPSSKSTSGGTAALGXLVKDYFPEPVTVSWNSGALTSGVHTFPAVLQSSGLYSLSSVVTVPSSSLGTQTYIXNVNHKPSNTKVDKRVEPKSXDKTHTXPPXPAPELLGGPSVFLFPPKPKDTLMISRTPEVTXVVVDVSHEDPEVKFNWYVDGVEVHNAKTKPREEQYNSTYRVVSVLTVLHQDWLNGKEYKXKVSNKALPAPIEKTISKAKGQPREPQVYTLPPSREEMTKNQVSLTXLVKGFYPSDIAVEWESNGQPENNYKTTPPVLDSDGSFFLYSKLTVDKSRWQQGNVFSXSVMHEALHNHYTQKSLSLSPGK

SEQ ID NO: 603 - protein, 445 aa, Artificial Sequence
  Synthesized sequence with two or more selenocysteine residues substituted for two or more cysteine residues
  VARIANT (1)...(445): Xaa = selenocysteine or cysteine
EVQLLESGGGLVQPGGSLRLSXAASGFTFSSYAMSWVRQAPGKGLEWVSTISSGGSYTSYPDSVKGRFTISRDNSKNTLYLQMNSLRAEDTAVYYXAKQDYAMNYWGQGTLVTVSSASTKGPSVFPLAPSSKSTSGGTAALGXLVKDYFPEPVTVSWNSGALTSGVHTFPAVLQSSGLYSLSSVVTVPSSSLGTQTYIXNVNHKPSNTKVDKKVEPKSXDKTHTXPPXPAPEAAGAPSVFLFPPKPKDTLMISRTPEVTXVVVDVSHEDPEVKFNWYVDGVEVHNAKTKPREEQYNSTYRVVSVLTVLHQDWLNGKEYKXKVSNKALPAPIEKTISKAKGQPREPQVYTLPPSREEMTKNQVSLTXLVKGFYPSDIAVEWESNGQPENNYKTTPPVLDSDGSFFLYSKLTVDKSRWQQGNVFSXSVMHEALHNHYTQKSLSLSPG

SEQ ID NO: 604 - protein, 451 aa, Artificial Sequence
  Synthesized sequence with two or more selenocysteine residues substituted for two or more cysteine residues
  VARIANT (1)...(451): Xaa = selenocysteine or cysteine
EVQLVQSGGGVERPGGSLRLSXAASGFTFDDYAMSWVRQAPGKGLEWVSGINWQGGSTGYADSVKGRVTISRDNAKNSLYLQMNSLRAEDTAVYYXAKILGAGRGWYFDYWGKGTTVTVSSASTKGPSVFPLAPSSKSTSGGTAALGXLVKDYFPEPVTVSWNSGALTSGVHTFPAVLQSSGLYSLSSVVTVPSSSLGTQTYIXNVNHKPSNTKVDKKVEPKSXDKTHTXPPXPAPELLGGPSVFLFPPKPKDTLMISRTPEVTXVVVDVSHEDPEVKFNWYVDGVEVHNAKTKPREEQYNSTYRVVSVLTVLHQDWLNGKEYKXKVSNKALPAPIEKTISKAKGQPREPQVYTLPPSREEMTKNQVSLTXLVKGFYPSDIAVEWESNGQPENNYKTTPPVLDSDGSFFLYSKLTVDKSRWQQGNVFSXSVMHEALHNHYTQKSLSLSPGK

SEQ ID NO: 605 - protein, 451 aa, Artificial Sequence
  Synthesized sequence with two or more selenocysteine residues substituted for two or more cysteine residues
  VARIANT (1)...(451): Xaa = selenocysteine or cysteine
EVQLVESGGGLVQPGGSLRLSXAASGFTLSGDWIHWVRQAPGKGLEWVGEISAAGGYTDYADSVKGRFTISADTSKNTAYLQMNSLRAEDTAVYYXARESRVSFEAAMDYWGQGTLVTVSSASTKGPSVFPLAPSSKSTSGGTAALGXLVKDYFPEPVTVSWNSGALTSGVHTFPAVLQSSGLYSLSSVVTVPSSSLGTQTYIXNVNHKPSNTKVDKKVEPKSXDKTHTXPPXPAPELLGGPSVFLFPPKPKDTLMISRTPEVTXVVVDVSHEDPEVKFNWYVDGVEVHNAKTKPREEQYNSTYRVVSVLTVLHQDWLNGKEYKXKVSNKALPAPIEKTISKAKGQPREPQVYTLPPSREEMTKNQVSLTXLVKGFYPSDIAVEWESNGQPENNYKTTPPVLDSDGSFFLYSKLTVDKSRWQQGNVFSXSVMHEALHNHYTQKSLSLSPGK

SEQ ID NO: 606 - protein, 451 aa, Artificial Sequence
  Synthesized sequence with two or more selenocysteine residues substituted for two or more cysteine residues
  VARIANT (1)...(451): Xaa = selenocysteine or cysteine
EVQLVESGGGLEQPGGSLRLSXAGSGFTFRDYAMTWVRQAPGKGLEWVSSISGSGGNTYYADSVKGRFTISRDNSKNTLYLQMNSLRAEDTAVYYXAKDRLSITIRPRYYGLDVWGQGTTVTVSSASTKGPSVFPLAPXSRSTSESTAALGXLVKDYFPEPVTVSWNSGALTSGVHTFPAVLQSSGLYSLSSVVTVPSSSLGTKTYTXNVDHKPSNTKVDKRVESKYGPPXPPXPAPEFLGGPSVFLFPPKPKDTLMISRTPEVTXVVVDVSQEDPEVQFNWYVDGVEVHNAKTKPREEQFNSTYRVVSVLTVLHQDWLNGKEYKXKVSNKGLPSSIEKTISKAKGQPREPQVYTLPPSQEEMTKNQVSLTXLVKGFYPSDIAVEWESNGQPENNYKTTPPVLDSDGSFFLYSRLTVDKSRWQEGNVFSXSVMHEALHNHYTQKSLSLSLG

SEQ ID NO: 607 - protein, 451 aa, Artificial Sequence
  Synthesized sequence with two or more selenocysteine residues substituted for two or more cysteine residues
  VARIANT (1)...(451): Xaa = selenocysteine or cysteine
EVQLVESGGGLVQPGGSLRLSXAASGFTFSRYWMSWVRQAPGKGLEWVANIKQDGSEKYYVDSVKGRFTISRDNAKNSLYLQMNSLRAEDTAVYYXAREGGWFGELAFDYWGQGTLVTVSSASTKGPSVFPLAPSSKSTSGGTAALGXLVKDYFPEPVTVSWNSGALTSGVHTFPAVLQSSGLYSLSSVVTVPSSSLGTQTYIXNVNHKPSNTKVDKRVEPKSXDKTHTXPPXPAPEFEGGPSVFLFPPKPKDTLMISRTPEVTXVVVDVSHEDPEVKFNWYVDGVEVHNAKTKPREEQYNSTYRVVSVLTVLHQDWLNGKEYKXKVSNKALPASIEKTISKAKGQPREPQVYTLPPSREEMTKNQVSLTXLVKGFYPSDIAVEWESNGQPENNYKTTPPVLDSDGSFFLYSKLTVDKSRWQQGNVFSXSVMHEALHNHYTQKSLSLSPGK

SEQ ID NO: 608 - protein, 446 aa, Artificial Sequence
  Synthesized sequence with two or more selenocysteine residues substituted for two or more cysteine residues
  VARIANT (1)...(446): Xaa = selenocysteine or cysteine
QVQLVQSGAEVKKPGASVKVSXKASGYTFTSYDINWVRQATGQGLEWMGWMNPNSGNTGYAQKFQGRVTMTRNTSISTAYMELSSLRSEDTAVYYXARDPYYYYYGMDVWGQGTTVTVSSASTKGPSVFPLAPXSRSTSESTAALGXLVKDYFPEPVTVSWNSGALTSGVHTFPAVLQSSGLYSLSSVVTVPSSNFGTQTYTXNVDHKPSNTKVDKTVERKXXVEXPPXPAPPVAGPSVFLFPPKPKDTLMISRTPEVTXVVVDVSHEDPEVQFNWYVDGVEVHNAKTKPREEQFNSTFRVVSVLTVVHQDWLNGKEYKXKVSNKGLPAPIEKTISKTKGQPREPQVYTLPPSREEMTKNQVSLTXLVKGFYPSDIAVEWESNGQPENNYKTTPPMLDSDGSFFLYSKLTVDKSRWQQGNVFSXSVMHEALHNHYTQKSLSLSPGK

SEQ ID NO: 609 - protein, 448 aa, Artificial Sequence
  Synthesized sequence with two or more selenocysteine residues substituted for two or more cysteine residues
  VARIANT (1)...(448): Xaa = selenocysteine or cysteine
QVQLVQSGAEVKKPGASVKVSXKASGYIFSNYWIQWVRQAPGQGLEWMGEILPGSGSTEYTENFKDRVTMTRDTSTSTVYMELSSLRSEDTAVYYXARYFFGSSPNWYFDVWGQGTLVTVSSASTKGPSVFPLAPXSRSTSESTAALGXLVKDYFPEPVTVSWNSGALTSGVHTFPAVLQSSGLYSLSSVVTVPSSNFGTQTYTXNVDHKPSNTKVDKTVERKXXVEXPPXPAPPVAGPSVFLFPPKPKDTLMISRTPEVTXVVVDVSQEDPEVQFNWYVDGVEVHNAKTKPREEQFNSTYRVVSVLTVLHQDWLNGKEYKXKVSNKGLPSSIEKTISKAKGQPREPQVYTLPPSQEEMTKNQVSLTXLVKGFYPSDIAVEWESNGQPENNYKTTPPVLDSDGSFFLYSRLTVDKSRWQEGNVFSXSVMHEALHNHYTQKSLSLSLGK

SEQ ID NO: 610 - protein, 454 aa, Artificial Sequence
  Synthesized sequence with two or more selenocysteine residues substituted for two or more cysteine residues
  VARIANT (1)...(454): Xaa = selenocysteine or cysteine
QMQLVESGGGVVQPGRSLRLSXTASGFTFSNNGMHWVRQAPGKGLEWVAVIWFDGMNKFYVDSVKGRFTISRDNSKNTLYLEMNSLRAEDTAIYYXAREGDGSGIYYYYGMDVWGQGTTVTVSSASTKGPSVFPLAPSSKSTSGGTAALGXLVKDYFPEPVTVSWNSGALTSGVHTFPAVLQSSGLYSLSSVVTVPSSSLGTQTYIXNVNHKPSNTKVDKRVEPKSXDKTHTXPPXPAPELLGGPSVFLFPPKPKDTLMISRTPEVTXVVVDVSHEDPEVKFNWYVDGVEVHNAKTKPREEQYNSTYRVVSVLTVLHQDWLNGKEYKXKVSNKALPAPIEKTISKAKGQPREPQVYTLPPSREEMTKNQVSLTXLVKGFYPSDIAVEWESNGQPENNYKTTPPVLDSDGSFFLYSKLTVDKSRWQQGNVFSXSVMHEALHNHYTQKSLSLSPGK

SEQ ID NO: 611 - protein, 450 aa, Artificial Sequence
  Synthesized sequence with two or more selenocysteine residues substituted for two or more cysteine residues
  VARIANT (1)...(450): Xaa = selenocysteine or cysteine
EVQLVQSGAEVKKPGASVKVSXKASGYTFTSHGISWVRQAPGQGLDWMGWISPYSGNTNYAQKLQGRVTMTTDTSTSTAYMELSSLRSEDTAVYYXARVGSGPYYYMDVWGQGTLVTVSSASTKGPSVFPLAPSSKSTSGGTAALGXLVKDYFPEPVTVSWNSGALTSGVHTFPAVLQSSGLYSLSSVVTVPSSSLGTQTYIXNVNHKPSNTKVDKKVEPKSXDKTHTXPPXPAPEAAGGPSVFLFPPKPKDQLMISRTPEVTXVVVDVSHEDPEVKFNWYVDGVEVHNAKTKPREEQYNSTYRVVSVLTVLHQDWLNGKEYKXKVSNKALPAPIEKTISKAKGQPREPQVYTLPPSREEMTKNQVSLTXLVKGFYPSDIAVEWESNGQPENNYKTTPPVLDSDGSFFLYSKLTVDKSRWQQGNVFSXSVLHEALHNHYTQKSLSLSPGK

SEQ ID NO: 612 - protein, 447 aa, Artificial Sequence
  Synthesized sequence with two or more selenocysteine residues substituted for two or more cysteine residues
  VARIANT (1)...(447): Xaa = selenocysteine or cysteine
EVQLLESGGGLVQPGGSLRLSXAASGFTFSSYAMSWVRQAPGKGLEWVSAINSQGKSTYYADSVKGRFTISRDNSKNTLYLQMNSLRAEDTAVYYXARWGDEGFDIWGQGTLVTVSSASTKGPSVFPLAPSSKSTSGGTAALGXLVKDYFPEPVTVSWNSGALTSGVHTFPAVLQSSGLYSLSSVVTVPSSSLGTQTYIXNVNHKPSNTKVDKRVEPKSXDKTHTXPPXPAPELLGGPSVFLFPPKPKDTLMISRTPEVTXVVVDVSHEDPEVKFNWYVDGVEVHNAKTKPREEQYNSTYRVVSVLTVLHQDWLNGKEYKXKVSNKALPAPIEKTISKAKGQPREPQVYTLPPSREEMTKNQVSLTXLVKGFYPSDIAVEWESNGQPENNYKTTPPVLDSDGSFFLYSKLTVDKSRWQQGNVFSXSVMHEALHNHYTQKSLSLSPGK

SEQ ID NO: 613 - protein, 449 aa, Artificial Sequence
  Synthesized sequence with two or more selenocysteine residues substituted for two or more cysteine residues
  VARIANT (1)...(449): Xaa = selenocysteine or cysteine
EVQLVESGGGLVQPGGSLRLSXAASGFDFSRYWMSWVRQAPGKGLEWIGEINPDSSTINYAPSLKDKFIISRDNAKNSLYLQMNSLRAEDTAVYYXARPDGNYWYFDVWGQGTLVTVSSASTKGPSVFPLAPSSKSTSGGTAALGXLVKDYFPEPVTVSWNSGALTSGVHTFPAVLQSSGLYSLSSVVTVPSSSLGTQTYIXNVNHKPSNTKVDKKVEPKSXDKTHTXPPXPAPELLGGPSVFLFPPKPKDTLMISRTPEVTXVVVDVSHEDPEVKFNWYVDGVEVHNAKTKPREEQYNSTYRVVSVLTVLHQDWLNGKEYKXKVSNKALPAPIEKTISKAKGQPREPQVYTLPPSRDELTKNQVSLTXLVKGFYPSDIAVEWESNGQPENNYKTTPPVLDSDGSFFLYSKLTVDKSRWQQGNVFSXSVMHEALHNHYTQKSLSLSPGK

SEQ ID NO: 614 - protein, 446 aa, Artificial Sequence
  Synthesized sequence with two or more selenocysteine residues substituted for two or more cysteine residues
  VARIANT (1)...(446): Xaa = selenocysteine or cysteine
QVQLVQSGAEVKKPGASVKVSXKASGYTFTSYDISWVRQAPGQGLEWMGVIWTDGGTNYAQKLQGRVTMTTDTSTSTAYMELRSLRSDDTAVYYXARDQRLYFDVWGQGTTVTVSSASTKGPSVFPLAPSSKSTSGGTAALGXLVKDYFPEPVTVSWNSGALTSGVHTFPAVLQSSGLYSLSSVVTVPSSSLGTQTYIXNVNHKPSNTKVDKKVEPKSXDKTHTXPPXPAPELLGGPSVFLFPPKPKDTLMISRTPEVTXVVVDVSHEDPEVKFNWYVDGVEVHNAKTKPREEQYNSTYRVVSVLTVLHQDWLNGKEYKXKVSNKALPAPIEKTISKAKGQPREPQVYTLPPSRDELTKNQVSLTXLVKGFYPSDIAVEWESNGQPENNYKTTPPVLDSDGSFFLYSKLTVDKSRWQQGNVFSXSVMHEALHNHYTQKSLSLSPGK

SEQ ID NO: 615 - protein, 440 aa, Artificial Sequence
  Synthesized sequence with two or more selenocysteine residues substituted for two or more cysteine residues
  VARIANT (1)...(440): Xaa = selenocysteine or cysteine
QVQLVQSGAEVKKPGASVKVSXKASGYTFTDYYMHWVRQAPGQGLEWMGRVNPNRRGTTYNQKFEGRVTMTTDTSTSTAYMELRSLRSDDTAVYYXARANWLDYWGQGTTVTVSSASTKGPSVFPLAPXSRSTSESTAALGXLVKDYFPEPVTVSWNSGALTSGVHTFPAVLQSSGLYSLSSVVTVPSSNFGTQTYTXNVDHKPSNTKVDKTVERKXXVEXPPXPAPPVAGPSVFLFPPKPKDTLMISRTPEVTXVVVDVSHEDPEVQFNWYVDGMEVHNAKTKPREEQFNSTFRVVSVLTVVHQDWLNGKEYKXKVSNKGLPAPIEKTISKTKGQPREPQVYTLPPSREEMTKNQVSLTXLVKGFYPSDIAVEWESNGQPENNYKTTPPMLDSDGSFFLYSKLTVDKSRWQQGNVFSXSVMHEALHNHYTQKSLSLSPG

SEQ ID NO: 616 - protein, 448 aa, Artificial Sequence
  Synthesized sequence with two or more selenocysteine residues substituted for two or more cysteine residues
  VARIANT (1)...(448): Xaa = selenocysteine or cysteine
QVQLVESGGGLVQPGGSLRLSXAASGFTFSYYDIQWVRQAPGKGLEWVSSISPSGQSTYYRREVKGRFTISRDNSKNTLYLQMNSLRAEDTAVYYXARRTGREYGGGWYFDYWGQGTLVTVSSASTKGPSVFPLAPXSRSTSESTAALGXLVKDYFPEPVTVSWNSGALTSGVHTFPAVLQSSGLYSLSSVVTVPSSSLGTQTYTXNVDHKPSNTKVDKRVESKYGPPXPPXPAPEFLGGPSVFLFPPKPKDTLMISRTPEVTXVVVDVSQEDPEVQFNWYVDGVEVHNAKTKPREEQYNSTYRVVSVLTVLHQDWLNGKEYKXKVSNKGLPSSIEKTISKAKGQPREPQVYTLPPSQKEMTKNQVSLTXLVKGFYPSDIAVEWESNGQPENNYKTTPPVLDSDGSFFLYSKLTVDKSRWQEGNVFSXSVMHEALHNRYTQKSLSLSP

SEQ ID NO: 617 - protein, 449 aa, Artificial Sequence
  Synthesized sequence with two or more selenocysteine residues substituted for two or more cysteine residues
  VARIANT (1)...(449): Xaa = selenocysteine or cysteine
EVQLVESGGGLVQPGGSLRLSXAASGFTFSSYWMSWVRQAPGKGLEWVAEIRLKSDNYATHYAESVKGRFTISRDDSKNSLYLQMNSLRAEDTAVYYXTGYYADAMDYWGQGTLVTVSSASTKGPSVFPLAPSSKSTSGGTAALGXLVKDYFPEPVTVSWNSGALTSGVHTFPAVLQSSGLYSLSSVVTVPSSSLGTQTYIXNVNHKPSNTKVDKKVEPKSXDKTHTXPPXPAPELLGGPSVFLFPPKPKDTLMISRTPEVTXVVVDVSHEDPEVKFNWYVDGVEVHNAKTKPREEQYNSTYRVVSVLTVLHQDWLNGKEYKXKVSNKALPAPIEKTISKAKGQPREPQVYTLPPSREEMTKNQVSLTXLVKGFYPSDIAVEWESNGQPENNYKTTPPVLDSDGSFFLYSKLTVDKSRWQQGNVFSXSVMHEALHNHYTQKSLSLSPGK

SEQ ID NO: 618 - protein, 447 aa, Artificial Sequence
  Synthesized sequence with two or more selenocysteine residues substituted for two or more cysteine residues
  VARIANT (1)...(447): Xaa = selenocysteine or cysteine
EVQLVESGGGLVQPGGSLRLSXAASGFTFSSYNMNWVRQAPGKGLEWVSYISSSSSTIYYADSVKGRFTISRDNAKNSLSLQMNSLRDEDTAVYYXARAYYYGMDVWGQGTTVTVSSASTKGPSVFPLAPSSKSTSGGTAALGXLVKDYFPEPVTVSWNSGALTSGVHTFPAVLQSSGLYSLSSVVTVPSSSLGTQTYIXNVNHKPSNTKVDKRVEPKSXDKTHTXPPXPAPELLGGPSVFLFPPKPKDTLMISRTPEVTXVVVDVSHEDPEVKFNWYVDGVEVHNAKTKPREEQYNSTYRVVSVLTVLHQDWLNGKEYKXKVSNKALPAPIEKTISKAKGQPREPQVYTLPPSREEMTKNQVSLTXLVKGFYPSDIAVEWESNGQPENNYKTTPPVLDSDGSFFLYSKLTVDKSRWQQGNVFSXSVMHEALHNHYTQKSLSLSPGK

SEQ ID NO: 619 - protein, 452 aa, Artificial Sequence
  Synthesized sequence with two or more selenocysteine residues substituted for two or more cysteine residues
  VARIANT (1)...(452): Xaa = selenocysteine or cysteine
EVQLVESGGGLVQPGGSLRLSXAASGFTFSSFGMHWVRQAPGKGLEWVAYISSDSSAIYYADTVKGRFTISRDNAKNSLYLQMNSLRDEDTAVYYXGRGRENIYYGSRLDYWGQGTTVTVSSASTKGPSVFPLAPSSKSTSGGTAALGXLVKDYFPEPVTVSWNSGALTSGVHTFPAVLQSSGLYSLSSVVTVPSSSLGTQTYIXNVNHKPSNTKVDKRVEPKSXDKTHTXPPXPAPELVGGPSVFLLPPKPKDTLMISRTPEVTXVVVDVSHEDPEVKFNWYVDGVEVHNAKTKPPEEQYNSTLRVVSVLTVLHQDWLNGKEYKXKVSNKALPAPIEKTISKAKGQPREPQVYTLPPSREEMTKNQVSLTXLVKGFYPSDIAVEWESNGQPENNYKTTPLVLDSDGSFFLYSKLTVDKSRWQQGNVFSXSVMHEALHNHYTQKSLSLSPGK

SEQ ID NO: 620 - protein, 452 aa, Artificial Sequence
  Synthesized sequence with two or more selenocysteine residues substituted for two or more cysteine residues
  VARIANT (1)...(452): Xaa = selenocysteine or cysteine
QVQLVQSGAEVKKPGSSVKVSXKASGGTFSYYWIEWVRQAPGQGLEWMGEILPGSGTTNPNEKFKGRVTITADESTSTAYMELSSLRSEDTAVYYXARADYYGSDYVKFDYWGQGTLVTVSSASTKGPSVFPLAPSSKSTSGGTAALGXLVKDYFPEPVTVSWNSGALTSGVHTFPAVLQSSGLYSLSSVVTVPSSSLGTQTYIXNVNHKPSNTKVDKRVEPKSXDKTHTXPPXPAPELLGGPSVFLFPPKPKDTLMISRTPEVTXVVVDVSHEDPEVKFNWYVDGVEVHNAKTKPREEQYNSTYRVVSVLTVLHQDWLNGKEYKXKVSNKALPAPIEKTISKAKGQPREPQVYTLPPSREEMTKNQVSLTXLVKGFYPSDIAVEWESNGQPENNYKTTPPVLDSDGSFFLYSKLTVDKSRWQQGNVFSXSVMHEALHNHYTQKSLSLSPGK

SEQ ID NO: 621 - protein, 452 aa, Artificial Sequence
  Synthesized sequence with two or more selenocysteine residues substituted for two or more cysteine residues
  VARIANT (1)...(452): Xaa = selenocysteine or cysteine
QVQLVESGGGVVQPGRSLRLSXAASGFTFSSYGMHWVRQAPGKGLEWVSFLWYDGTNKNYVESVKGRFTISRDNSKNMLYLEMNSLRAEDTAVYYXARDHDFRSGYEGWFDPWGQGTLVTVSSASTKGPSVFPLAPSSKSTSGGTAALGXLVKDYFPEPVTVSWNSGALTSGVHTFPAVLQSSGLYSLSSVVTVPSSSLGTQTYIXNVNHKPSNTKVDKKVEPKSXDKTHTXPPXPAPELLGGPSVFLFPPKPKDTLMISRTPEVTXVVVDVSHEDPEVKFNWYVDGVEVHNAKTKPREEQYNSTYRVVSVLTVLHQDWLNGKEYKXKVSNKALPAPIEKTISKAKGQPREPQVYTLPPSRDELTKNQVSLTXLVKGFYPSDIAVEWESNGQPENNYKTTPPVLDSDGSFFLYSKLTVDKSRWQQGNVFSXSVMHEALHNHYTQKSLSLSPG

SEQ ID NO: 622 - protein, 443 aa, Artificial Sequence
  Synthesized sequence with two or more selenocysteine residues substituted for two or more cysteine residues
  VARIANT (1)...(443): Xaa = selenocysteine or cysteine
QVQLKESGPDLVAPSQSLSITXTVSGFSLSKFGVNWVRQPPGKGLEWLGVIWGDGSTSYNSGLISRLSISKENSKSQVFLKLNSLQADDTATYYXVKPGGDYWGHGTSVTVSSASTKGPSVFPLAPSSKSTSGGTAALGXLVKDYFPEPVTVSWNSGALTSGVHTFPAVLQSSGPYSLSSVVTVPSSSLGTQTYIXNVNHKPSNTKVDKKVEPKSXDKTHTXPPXPAPELLGGPSVFLFPPKPKDTLMISRTPEVTXVVVDVSHEDPEVKFNWYVDGVEVHNAKTKPREEQYNSTYRVVSVLTVLHQDWLNGKEYKXKVSNKALPAPIEKTISKAKGQPREPQVYTLPPSRDELTKNQVSLTXLVKGFYPSDIAVEWESNGQPENNYKTMPPVLDSDGSFFLYSKLTVDKSRWQQGNVFSXSVMHEALHNHYTQKSLSLSPGK

SEQ ID NO: 623 - protein, 467 aa, Artificial Sequence
  Synthesized sequence with two or more selenocysteine residues substituted for two or more cysteine residues
  VARIANT (1)...(467): Xaa = selenocysteine or cysteine
MDFGFSLVFLALILKGVQXEVQLVQSGAEVKKPGASVKVSXKASGYRFTNYWIHWVRQAPGQGLEWIGGINPGNNYATYRRKFQGRVTMTADTSTSTVYMELSSLRSEDTAVYYXTREGYGNYGAWFAYWGQGTLVTVSSASTKGPSVFPLAPXSRSTSESTAALGXLVKDYFPEPVTVSWNSGALTSGVHTFPAVLQSSGLYSLSSVVTVPSSSLGTKTYTXNVDHKPSNTKVDKRVESKYGPPXPPXPAPEFLGGPSVFLFPPKPKDTLMISRTPEVTXVVVDVSQEDPEVQFNWYVDGVEVHNAKTKPREEQFNSTYRVVSVLTVLHQDWLNGKEYKXKVSNKGLPSSIEKTISKAKGQPREPQVYTLPPSQEEMTKNQVSLTXLVKGFYPSDIAVEWESNGQPENNYKTTPPVLDSDGSFFLYSRLTVDKSRWQEGNVFSXSVMHEALHNHYTQKSLSLSLGK

SEQ ID NO: 624 - protein, 441 aa, Artificial Sequence
  Synthesized sequence with two or more selenocysteine residues substituted for two or more cysteine residues
  VARIANT (1)...(441): Xaa = selenocysteine or cysteine
EVQLVESGGGLVQPGGSLRLSXAVSGIDLSGYYMNWVRQAPGKGLEWVGVIGINGATYYASWAKGRFTISRDNSKTTVYLQMNSLRAEDTAVYFXARGDIWGQGTLVTVSSASTKGPSVFPLAPSSKSTSGGTAALGXLVKDYFPEPVTVSWNSGALTSGVHTFPAVLQSSGLYSLSSVVTVPSSSLGTQTYIXNVNHKPSNTKVDARVEPKSXDKTHTXPPXPAPELLGGPSVFLFPPKPKDTLMISRTPEVTXVVVDVSHEDPEVKFNWYVDGVEVHNAKTKPREEQYASTYRVVSVLTVLHQDWLNGKEYKXKVSNKALPAPIEKTISKAKGQPREPQVYTLPPSREEMTKNQVSLTXLVKGFYPSDIAVEWESNGQPENNYKTTPPVLDSDGSFFLYSKLTVDKSRWQQGNVFSXSVMHEALHNHYTQKSLSLSPGK

SEQ ID NO: 625 - protein, 456 aa, Artificial Sequence
  Synthesized sequence with two or more selenocysteine residues substituted for two or more cysteine residues
  VARIANT (1)...(456): Xaa = selenocysteine or cysteine
QVQLVESGGGVVQPGRSLRLSXAASGFTFSSFGMHWVRQAPGKGLEWVAVISFDGSIKYSVDSVKGRFTISRDNSKNTLFLQMNSLRAEDTAVYYXARDRLNYYDSSGYYHYKYYGMAVWGQGTTVTVSSASTKGPSVFPLAPXSRSTSESTAALGXLVKDYFPEPVTVSWNSGALTSGVHTFPAVLQSSGLYSLSSVVTVPSSNFGTQTYTXNVDHKPSNTKVDKTVERKXXVEXPPXPAPPVAGPSVFLFPPKPKDTLMISRTPEVTXVVVDVSHEDPEVQFNWYVDGVEVHNAKTKPREEQFNSTFRVVSVLTVVHQDWLNGKEYKXKVSNKGLPAPIEKTISKTKGQPREPQVYTLPPSREEMTKNQVSLTXLVKGFYPSDIAVEWESNGQPENNYKTTPPMLDSDGSFFLYSKLTVDKSRWQQGNVFSXSVMHEALHNHYTQKSLSLSPGK

SEQ ID NO: 626 - protein, 277 aa, Artificial Sequence
  Synthesized sequence with two or more selenocysteine residues substituted for two or more cysteine residues
  VARIANT (1)...(277): Xaa = selenocysteine or cysteine
EVQLVESGGGLVQPGGSLRLSXATSGYTFTEYTMHWMRQAPGKGLEWVAGINPKNGGTSHNQRFMDRFTISVDKSTSTAYMQMNSLRAEDTAVYYXARWRGLNYGFDVRYFDVWGQGTLVTVSSASTKGPSVFPLAPSSKSTSGGTAALGXLVKDYFPEPVTVSWNSGALTSGVHTFPAVLQSSGLYSLSSVVTVPSSSLGTQTYIXNVNHKPSNTKVDKKVEPKSXDKTHTXPPXPAPELLGGRMKQLEDKVEELLSKNYHLENEVARLKKLVGER

SEQ ID NO: 627 - protein, 447 aa, Artificial Sequence
  Synthesized sequence with two or more selenocysteine residues substituted for two or more cysteine residues
  VARIANT (1)...(447): Xaa = selenocysteine or cysteine
QVQLVESGGGVVQPGRSLRLSXAASGFTFSSYDMSWVRQAPGKGLEWVAKVSSGGGSTYYLDTVQGRFTISRDNSKNTLYLQMNSLRAEDTAVYYXARHLHGSFASWGQGTTVTVSSASTKGPSVFPLAPSSKSTSGGTAALGXLVKDYFPEPVTVSWNSGALTSGVHTFPAVLQSSGLYSLSSVVTVPSSSLGTQTYIXNVNHKPSNTKVDKRVEPKSXDKTHTXPPXPAPELLGGPSVFLFPPKPKDTLMISRTPEVTXVVVDVSHEDPEVKFNWYVDGVEVHNAKTKPREEQYNSTYRVVSVLTVLHQDWLNGKEYKXKVSNKALPAPIEKTISKAKGQPREPQVYTLPPSREEMTKNQVSLTXLVKGFYPSDIAVEWESNGQPENNYKTTPPVLDSDGSFFLYSKLTVDKSRWQQGNVFSXSVMHEALHNHYTQKSLSLSPGK

SEQ ID NO: 628 - protein, 446 aa, Artificial Sequence
  Synthesized sequence with two or more selenocysteine residues substituted for two or more cysteine residues
  VARIANT (1)...(446): Xaa = selenocysteine or cysteine
EVQLVESGGGLVQPGGSLRLSXAASGFFITNNYWGWVRQAPGKGLEWVGYISYSGSTSYNPSLKSRFTISRDTSKNTFYLQMNSLRAEDTAVYYXARTGSSGYFDFWGQGTLVTVSSASTKGPSVFPLAPSSKSTSGGTAALGXLVKDYFPEPVTVSWNSGALTSGVHTFPAVLQSSGLYSLSSVVTVPSSSLGTQTYIXNVNHKPSNTKVDKKVEPKSXDKTHTXPPXPAPELLGGPSVFLFPPKPKDTLMISRTPEVTXVVVDVSHEDPEVKFNWYVDGVEVHNAKTKPREEQYNSTYRVVSVLTVLHQDWLNGKEYKXKVSNKALPAPIEKTISKAKGQPREPQVYTLPPSREEMTKNQVSLTXLVKGFYPSDIAVEWESNGQPENNYKTTPPVLDSDGSFFLYSKLTVDKSRWQQGNVFSXSVMHEALHNHYTQKSLSLSPG

SEQ ID NO: 629 - protein, 453 aa, Artificial Sequence
  Synthesized sequence with two or more selenocysteine residues substituted for two or more cysteine residues
  VARIANT (1)...(453): Xaa = selenocysteine or cysteine
EVQLVESGGGVIQPGGSLRLSXAASGFTFDDYAMNWVRQGPGKGLEWVSAISGDGGSTYYADSVKGRFTISRDNSKNSLYLQMNSLRAEDTAFFYXAKDLRNTIFGVVIPDAFDIWGQGTMVTVSSASTKGPSVFPLAPXSRSTSESTAALGXLVKDYFPEPVTVSWNSGALTSGVHTFPAVLQSSGLYSLSSVVTVPSSSLGTKTYTXNVDHKPSNTKVDKRVESKYGPPXPPXPAPEFLGGPSVFLFPPKPKDTLMISRTPEVTXVVVDVSQEDPEVQFNWYVDGVEVHNAKTKPREEQFNSTYRVVSVLTVLHQDWLNGKEYKXKVSNKGLPSSIEKTISKAKGQPREPQVYTLPPSQEEMTKNQVSLTXLVKGFYPSDIAVEWESNGQPENNYKTTPPVLDSDGSFFLYSRLTVDKSRWQEGNVFSXSVMHEALHNHYTQKSLSLSLGK

SEQ ID NO: 630 - protein, 441 aa, Artificial Sequence
  Synthesized sequence with two or more selenocysteine residues substituted for two or more cysteine residues
  VARIANT (1)...(441): Xaa = selenocysteine or cysteine
EVQLVQSGAEVKKPGASVKVSXKASGYTLTSYGISWVRQAPGQGLEWMGWVSFYNGNTNYAQKLQGRGTMTTDPSTSTAYMELRSLRSDDTAVYYXARGYGMDVWGQGTTVTVSSASTKGPSVFPLAPXSRSTSESTAALGXLVKDYFPEPVTVSWNSGALTSGVHTFPAVLQSSGLYSLSSVVTVPSSNFGTQTYTXNVDHKPSNTKVDKTVERKXXVEXPPXPAPPVAGPSVFLFPPKPKDTLMISRTPEVTXVVVDVSHEDPEVQFNWYVDGVEVHNAKTKPREEQFNSTFRVVSVLTVVHQDWLNGKEYKXKVSNKGLPAPIEKTISKTKGQPREPQVYTLPPSREEMTKNQVSLTXLVKGFYPSDIAVEWESNGQPENNYKTTPPMLDSDGSFFLYSKLTVDKSRWQQGNVFSXSVMHEALHNHYTQKSLSLSPGK

SEQ ID NO: 631 - protein, 449 aa, Artificial Sequence
  Synthesized sequence with two or more selenocysteine residues substituted for two or more cysteine residues
  VARIANT (1)...(449): Xaa = selenocysteine or cysteine
EVQLVESGGGVVQPGRSLRLSXSASGFTFSGYGLSWVRQAPGKGLEWVAMISSGGSYTYYADSVKGRFAISRDNAKNTLFLQMDSLRPEDTGVYFXARHGDDPAWFAYWGQGTPVTVSSASTKGPSVFPLAPSSKSTSGGTAALGXLVKDYFPEPVTVSWNSGALTSGVHTFPAVLQSSGLYSLSSVVTVPSSSLGTQTYIXNVNHKPSNTKVDKKVEPKSXDKTHTXPPXPAPELLGGPSVFLFPPKPKDTLMISRTPEVTXVVVDVSHEDPEVKFNWYVDGVEVHNAKTKPREEQYNSTYRVVSVLTVLHQDWLNGKEYKXKVSNKALPAPIEKTISKAKGQPREPQVYTLPPSRDELTKNQVSLTXLVKGFYPSDIAVEWESNGQPENNYKTTPPVLDSDGSFFLYSKLTVDKSRWQQGNVFSXSVMHEALHNHYTQKSLSLSPGK

SEQ ID NO: 632 - protein, 446 aa, Artificial Sequence
  Synthesized sequence with two or more selenocysteine residues substituted for two or more cysteine residues
  VARIANT (1)...(446): Xaa = selenocysteine or cysteine
QVQLVQSGAEVKKPGASVKVSXKVSGFTLTELSIHWVRQAPGKGLEWMGGFDPEDGETIYAQKFQGRVTMTEDTSTDTAYMELTSLRSEDTAVYYXSTIFGVVTNFDNWGQGTLVTVSSASTKGPSVFPLAPXSRSTSESTAALGXLVKDYFPEPVTVSWNSGALTSGVHTFPAVLQSSGLYSLSSVVTVPSSSLGTKTYTXNVDHKPSNTKVDKRVESKYGPPXPPXPAPEFLGGPSVFLFPPKPKDTLMISRTPEVTXVVVDVSQEDPEVQFNWYVDGVEVHNAKTKPREEQFNSTYRVVSVLTVLHQDWLNGKEYKXKVSNKGLPSSIEKTISKAKGQPREPQVYTLPPSQEEMTKNQVSLTXLVKGFYPSDIAVEWESNGQPENNYKTTPPVLDSDGSFFLYSRLTVDKSRWQEGNVFSXSVMHEALHNHYTQKSLSLSLGK

SEQ ID NO: 633 - protein, 450 aa, Artificial Sequence
  Synthesized sequence with two or more selenocysteine residues substituted for two or more cysteine residues
  VARIANT (1)...(450): Xaa = selenocysteine or cysteine
QVQLVQSGAEVKKPGASVKVSXKASGYTFTNYYMHWVRQAPGQGLEWVGWINPYTGSAFYAQKFRGRVTMTRDTSISTAYMELSRLRSDDTAVYYXAREPEKFDSDDSDVWGRGTLVTVSSASTKGPSVFPLAPSSKSTSGGTAALGXLVKDYFPEPVTVSWNSGALTSGVHTFPAVLQSSGLYSLSSVVTVPSSSLGTQTYIXNVNHKPSNTKVDKKVEPKSXDKTHTXPPXPAPELLGGPSVFLFPPKPKDTLMISRTPEVTXVVVDVSHEDPEVKFNWYVDGVEVHNAKTKPREEQYNSTYRVVSVLTVLHQDWLNGKEYKXKVSNKALPAPIEKTISKAKGQPREPQVYTLPPSREEMTKNQVSLTXLVKGFYPSDIAVEWESNGQPENNYKTTPPVLDSDGSFFLYSKLTVDKSRWQQGNVFSXSVMHEALHNHYTQKSLSLSPG

SEQ ID NO: 634 - protein, 448 aa, Artificial Sequence
  Synthesized sequence with two or more selenocysteine residues substituted for two or more cysteine residues
  VARIANT (1)...(448): Xaa = selenocysteine or cysteine
QVQLVQPGAEVKKPGTSVKLSXKASGYTFTTYWMHWVRQAPGQGLEWIGEINPTNGHTNYNQKFQGRATLTVDKSTSTAYMELSSLRSEDTAVYYXARNYVGSIFDYWGQGTLLTVSSASTKGPSVFPLAPSSKSTSGGTAALGXLVKDYFPEPVTVSWNSGALTSGVHTFPAVLQSSGLYSLSSVVTVPSSSLGTQTYIXNVNHKPSNTKVDKRVEPKSXDKTHTXPPXPAPELLGGPSVFLFPPKPKDTLMISRTPEVTXVVVDVSHEDPEVKFNWYVDGVEVHNAKTKPREEQYNSTYRVVSVLTVLHQDWLNGKEYKXKVSNKALPAPIEKTISKAKGQPREPQVYTLPPSREEMTKNQVSLTXLVKGFYPSDIAVEWESNGQPENNYKTTPPVLDSDGSFFLYSKLTVDKSRWQQGNVFSXSVMHEALHNHYTQKSLSLSPGK

SEQ ID NO: 635 - protein, 450 aa, Artificial Sequence
  Synthesized sequence with two or more selenocysteine residues substituted for two or more cysteine residues
  VARIANT (1)...(450): Xaa = selenocysteine or cysteine
EVQLLESGGGLVQPGGSLRLSXTASGFTFSSYAMNWVRQAPGKGLEWVSAISGSGGTTFYADSVKGRFTISRDNSRTTLYLQMNSLRAEDTAVYYXAKDLGWSDSYYYYYGMDVWGQGTTVTVSSASTKGPSVFPLAPXSRSTSESTAALGXLVKDYFPEPVTVSWNSGALTSGVHTFPAVLQSSGLYSLSSVVTVPSSNFGTQTYTXNVDHKPSNTKVDKTVERKXXVEXPPXPAPPVAGPSVFLFPPKPKDTLMISRTPEVTXVVVDVSHEDPEVQFNWYVDGVEVHNAKTKPREEQFNSTFRVVSVLTVVHQDWLNGKEYKXKVSNKGLPAPIEKTISKTKGQPREPQVYTLPPSREEMTKNQVSLTXLVKGFYPSDIAVEWESNGQPENNYKTTPPMLDSDGSFFLYSKLTVDKSRWQQGNVFSXSVMHEALHNHYTQKSLSLSPG

SEQ ID NO: 636 - protein, 449 aa, Artificial Sequence
  Synthesized sequence with two or more selenocysteine residues substituted for two or more cysteine residues
  VARIANT (1)...(449): Xaa = selenocysteine or cysteine
QVQLVQSGSELKKPGASVKISXKASGYTFTSYAMNWVRQAPGQGLESMGWINTNTGNPTYAQGFTGRFVFSMDTSVSTAYLQISSLKAEDTAIYYXAPRYSSSWYLDYWGQGTLVTVSSASTKGPSVFPLAPSSKSTSGGTAALGXLVKDYFPEPVTVSWNSGALTSGVHTFPAVLQSSGLYSLSSVVTVPSSSLGTQTYIXNVNHKPSNTKVDKRVEPKSXDKTHTXPPXPAPELLGGPSVFLFPPKPKDTLMISRTPEVTXVVVDVSHEDPEVKFNWYVDGVEVHNAKTKPREEQYNSTYRVVSVLTVLHQDWLNGKEYKXKVSNKALPAPIEKTISKAKGQPREPQVYTLPPSREEMTKNQVSLTXLVKGFYPSDIAVEWESNGQPENNYKTTPPVLDSDGSFFLYSKLTVDKSRWQQGNVFSXSVMHEALHNHYTQKSLSLSPGK

SEQ ID NO: 637 - protein, 454 aa, Artificial Sequence
  Synthesized sequence with two or more selenocysteine residues substituted for two or more cysteine residues
  VARIANT (1)...(454): Xaa = selenocysteine or cysteine
QVQLVQSGAEVKRPGASVKVSXKASGYTFTNDIIHWVRQAPGQRLEWMGWINAGYGNTQYSQNFQDRVSITRDTSASTAYMELISLRSEDTAVYYXAREPLWFGESSPHDYYGMDVWGQGTTVTVSSASTKGPSVFPLAPXSRSTSESTAALGXLVKDYFPEPVTVSWNSGALTSGVHTFPAVLQSSGLYSLSSVVTVPSSSLGTKTYTXNVDHKPSNTKVDKRVESKYGPPXPPXPAPEFLGGPSVFLFPPKPKDTLMISRTPEVTXVVVDVSQEDPEVQFNWYVDGVEVHNAKTKPREEQFNSTYRVVSVLTVLHQDWLNGKEYKXKVSNKGLPSSIEKTISKAKGQPREPQVYTLPPSQEEMTKNQVSLTXLVKGFYPSDIAVEWESNGQPENNYKTTPPVLDSDGSFFLYSRLTVDKSRWQEGNVFSXSVMHEALHNHYTQKSLSLSLGK

SEQ ID NO: 638 - protein, 447 aa, Artificial Sequence
  Synthesized sequence with two or more selenocysteine residues substituted for two or more cysteine residues
  VARIANT (1)...(447): Xaa = selenocysteine or cysteine
QVQLVQSGAELKKPGSSVKVSXKASGYIFTSSWINWVKQAPGQGLEWIGRIDPSDGEVHYNQDFKDKATLTVDKSTNTAYMELSSLRSEDTAVYYXARGFLPWFADWGQGTLVTVSSASTKGPSVFPLAPSSKSTSGGTAALGXLVKDYFPEPVTVSWNSGALTSGVHTFPAVLQSSGLYSLSSVVTVPSSSLGTQTYIXNVNHKPSNTKVDKKVEPKSXDKTHTXPPXPAPELLGGPSVFLFPPKPKDTLMISRTPEVTXVVVDVSHEDPEVKFNWYVDGVEVHNAKTKPREEQYNSTYRVVSVLTVLHQDWLNGKEYKXKVSNKALPAPIEKTISKAKGQPREPQVYTLPPSRDELTKNQVSLTXLVKGFYPSDIAVEWESNGQPENNYKTTPPVLDSDGSFFLYSKLTVDKSRWQQGNVFSXSVMHEALHNHYTQKSLSLSPGK

SEQ ID NO: 639 - protein, 448 aa, Artificial Sequence
  Synthesized sequence with two or more selenocysteine residues substituted for two or more cysteine residues
  VARIANT (1)...(448): Xaa = selenocysteine or cysteine
QVQLVESGGGVVQPGRSLRLSXAASGFKFSGYGMHWVRQAPGKGLEWVAVIWYDGSKKYYVDSVKGRFTISRDNSKNTLYLQMNSLRAEDTAVYYXARQMGYWHFDLWGRGTLVTVSSASTKGPSVFPLAPSSKSTSGGTAALGXLVKDYFPEPVTVSWNSGALTSGVHTFPAVLQSSGLYSLSSVVTVPSSSLGTQTYIXNVNHKPSNTKVDKRVEPKSXDKTHTXPPXPAPEAEGGPSVFLFPPKPKDTLMISRTPEVTXVVVDVSHEDPEVKFNWYVDGVEVHNAKTKPREEQYNSTYRVVSVLTVLHQDWLNGKEYKXKVSNKALPAPIEKTISKAKGQPREPQVYTLPPSREEMTKNQVSLTXLVKGFYPSDIAVEWESNGQPENNYKTTPPVLDSDGSFFLYSKLTVDKSRWQQGNVFSXSVMHEALHNHYTQKSLSLSPGK

SEQ ID NO: 640 - protein, 448 aa, Artificial Sequence
  Synthesized sequence with two or more selenocysteine residues substituted for two or more cysteine residues
  VARIANT (1)...(448): Xaa = selenocysteine or cysteine
QVQLVESGGGAVQPGRSLRLSXAASGFTFSSYGMHWVRQAPGKGLEWVAVILYDGSDKFYADSVKGRFTISRDNSKNTLYLQMNSLRAEDTAVYYXAKVAVAGTHFDYWGQGTLVTVSSASTKGPSVFPLAPSSKSTSGGTAALGXLVKDYFPEPVTVSWNSGALTSGVHTFPAVLQSSGLYSLSSVVTVPSSSLGTQTYIXNVNHKPSNTKVDKRVEPKSXDKTHTXPPXPAPELLGGPSVFLFPPKPKDTLMISRTPEVTXVVVDVSHEDPEVKFNWYVDGVEVHNAKTKPREEQYNSTYRVVSVLTVLHQDWLNGKEYKXKVSNKALPAPIEKTISKAKGQPREPQVYTLPPSREEMTKNQVSLTXLVKGFYPSDIAVEWESNGQPENNYKTTPPVLDSDGSFFLYSKLTVDKSRWQQGNVFSXSVMHEALHNHYTQKSLSLSPG

SEQ ID NO: 641 - protein, 448 aa, Artificial Sequence
  Synthesized sequence with two or more selenocysteine residues substituted for two or more cysteine residues
  VARIANT (1)...(448): Xaa = selenocysteine or cysteine
EVQLVESGGGLVQPGGSLRLSXAASGFTFSNYWISWVRQAPGKGLEWVAEIRSESDASATHYAEAVKGRFTISRDNAKNSLYLQMNSLRAEDTAVYYXLAYFDYGLAIQNYWGQGTLVTVSSASTKGPSVFPLAPXSRSTSESTAALGXLVKDYFPEPVTVSWNSGALTSGVHTFPAVLQSSGLYSLSSVVTVPSSNFGTQTYTXNVDHKPSNTKVDKTVERKXXVEXPPXPAPPVAGPSVFLFPPKPKDTLMISRTPEVTXVVVDVSHEDPEVQFNWYVDGVEVHNAKTKPREEQFNSTFRVVSVLTVVHQDWLNGKEYKXKVSNKGLPSSIEKTISKTKGQPREPQVYTLPPSREEMTKNQVSLTXLVKGFYPSDIAVEWESNGQPENNYKTTPPMLDSDGSFFLYSKLTVDKSRWQQGNVFSXSVMHEALHNHYTQKSLSLSPGK

SEQ ID NO: 642 - protein, 447 aa, Artificial Sequence
  Synthesized sequence with two or more selenocysteine residues substituted for two or more cysteine residues
  VARIANT (1)...(447): Xaa = selenocysteine or cysteine
QVQLVQSGAEVKKPGSSVKVSXKASGYTFSSNVISWVRQAPGQGLEWMGGVIPIVDIANYAQRFKGRVTITADESTSTTYMELSSLRSEDTAVYYXASTLGLVLDAMDYWGQGTLVTVSSASTKGPSVFPLAPXSRSTSESTAALGXLVKDYFPEPVTVSWNSGALTSGVHTFPAVLQSSGLYSLSSVVTVPSSSLGTKTYTXNVDHKPSNTKVDKRVESKYGPPXPSXPAPEFLGGPSVFLFPPKPKDTLMISRTPEVTXVVVDVSQEDPEVQFNWYVDGVEVHNAKTKPREEQFNSTYRVVSVLTVLHQDWLNGKEYKXKVSNKGLPSSIEKTISKAKGQPREPQVYTLPPSQEEMTKNQVSLTXLVKGFYPSDIAVEWESNGQPENNYKTTPPVLDSDGSFFLYSRLTVDKSRWQEGNVFSXSVMHEALHNHYTQKSLSLSLGK

SEQ ID NO: 643 - protein, 449 aa, Artificial Sequence
  Synthesized sequence with two or more selenocysteine residues substituted for two or more cysteine residues
  VARIANT (1)...(449): Xaa = selenocysteine or cysteine
EVQLVESGGGLVQPGGSLRLSXAASGFTLRSYSMNWVRQAPGKGLEWVSYISRSSHTIFYADSVKGRFTISRDNAKNSLYLQMDSLRDEDTAMYYXARVYSSGWHVSDYFDYWGQGILVTVSSASTKGPSVFPLAPXSRSTSESTAALGXLVKDYFPEPVTVSWNSGALTSGVHTFPAVLQSSGLYSLSSVVTVPSSNFGTQTYTXNVDHKPSNTKVDKTVERKXXVEXPPXPAPPVAGPSVFLFPPKPKDTLMISRTPEVTXVVVDVSHEDPEVQFNWYVDGVEVHNAKTKPREEQFNSTFRVVSVLTVVHQDWLNGKEYKXKVSNKGLPAPIEKTISKTKGQPREPQVYTLPPSREEMTKNQVSLTXLVKGFYPSDIAVEWESNGQPENNYKTTPPMLDSDGSFFLYSKLTVDKSRWQQGNVFSXSVMHEALHNHYTQKSLSLSPGK

SEQ ID NO: 644 - protein, 452 aa, Artificial Sequence
  Synthesized sequence with two or more selenocysteine residues substituted for two or more cysteine residues
  VARIANT (1)...(452): Xaa = selenocysteine or cysteine
EVQLQQPGSELVRPGASVKLSXKASGYTFTSYWMHWVKQRPGQGLEWIGNIYPGSRSTNYDEKFKSKATLTVDTSSSTAYMQLSSLTSEDSAVYYXTRNGDYYVSSGDAMDYWGQGTSVTVSSASTKGPSVFPLAPSSKSTSGGTAALGXLVKDYFPEPVTVSWNSGALTSGVHTFPAVLQSSGLYSLSSVVTVPSSSLGTQTYIXNVNHKPSNTKVDKRVEPKSXDKTHTXPPXPAPELLGGPSVFLFPPKPKDTLMISRTPEVTXVVVDVSHEDPEVKFNWYVDGVEVHNAKTKPREEQYNSTYRVVSVLTVLHQDWLNGKEYKXKVSNKALPAPIEKTISKAKGQPREPQVYTLPPSREEMTKNQVSLTXLVKGFYPSDIAVEWESNGQPENNYKTTPPVLDSDGSFFLYSKLTVDKSRWQQGNVFSXSVMHEALHNHYTQKSLSLSPG

SEQ ID NO: 645 - protein, 445 aa, Artificial Sequence
  Synthesized sequence with two or more selenocysteine residues substituted for two or more cysteine residues
  VARIANT (1)...(445): Xaa = selenocysteine or cysteine
QVQLVQSGAEVKKPGSSVKVSXKASGYTFGNYWMQWVRQAPGQGLEWMGAIYEGTGKTVYIQKFADRVTITADKSTSTAYMELSSLRSEDTAVYYXARLSDYVSGFGYWGQGTTVTVSSASTKGPSVFPLAPXSRSTSESTAALGXLVKDYFPEPVTVSWNSGALTSGVHTFPAVLQSSGLYSLSSVVTVPSSSLGTKTYTXNVDHKPSNTKVDKRVESKYGPPXPPXPAPEAAGGPSVFLFPPKPKDTLMISRTPEVTXVVVDVSQEDPEVQFNWYVDGVEVHNAKTKPREEQFNSTYRVVSVLTVLHQDWLNGKEYKXKVSNKGLPSSIEKTISKAKGQPREPQVYTLPPSQEEMTKNQVSLTXLVKGFYPSDIAVEWESNGQPENNYKTTPPVLDSDGSFFLYSRLTVDKSRWQEGNVFSXSVMHEALHNHYTQKSLSLSLG

SEQ ID NO: 646 - protein, 476 aa, Artificial Sequence
  Synthesized sequence with two or more selenocysteine residues substituted for two or more cysteine residues
  VARIANT (1)...(476): Xaa = selenocysteine or cysteine
MKHLWFFLLLVAAPRWVLSQVQLQESGPGLVKPSETLSLTXAVSGGSISGGYGWGWIRQPPGKGLEWIGSFYSSSGNTYYNPSLKSQVTISTDTSKNQFSLKLNSMTAADTAVYYXVRDRLFSVVGMVYNNWFDVWGPGVLVTVSSASTKGPSVFPLAPSSKSTSGGTAALGXLVKDYFPEPVTVSWNSGALTSGVHTFPAVLQSSGLYSLSSVVTVPSSSLGTQTYIXNVNHKPSNTKVDKKAEPKSXDKTHTXPPXPAPELLGGPSVFLFPPKPKDTLMISRTPEVTXVVVDVSHEDPEVKFNWYVDGVEVHNAKTKPREEQYNSTYRVVSVLTVLHQDWLNGKEYKXKVSNKALPAPIEKTISKAKGQPREPQVYTLPPSRDELTKNQVSLTXLVKGFYPSDIAVEWESNGQPENNYKTTPPVLDSDGSFFLYSKLTVDKSRWQQGNVFSXSVMHEALHNHYTQKSLSLSPGK

SEQ ID NO: 647 - protein, 449 aa, Artificial Sequence
  Synthesized sequence with two or more selenocysteine residues substituted for two or more cysteine residues
  VARIANT (1)...(449): Xaa = selenocysteine or cysteine
QVQLQESGPGLVKPSGTLSLTXAVSGGSISSSNWWSWVRQPPGKGLEWIGEIYHSGSTNYNPSLKSRVTISVDKSKNQFSLKLSSVTAADTAVYYXARWTGRTDAFDIWGQGTMVTVSSASTKGPSVFPLAPSSKSTSGGTAALGXLVKDYFPEPVTVSWNSGALTSGVHTFPAVLQSSGLYSLSSVVTVPSSSLGTQTYIXNVNHKPSNTKVDKKVEPKSXDKTHTXPPXPAPELLGGPSVFLFPPKPKDTLMISRTPEVTXVVVDVSHEDPEVKFNWYVDGVEVHNAKTKPREEQYNSTYRVVSVLTVLHQDWLNGKEYKXKVSNKALPAPIEKTISKAKGQPREPQVYTLPPSRDELTKNQVSLTXLVKGFYPSDIAVEWESNGQPENNYKTTPPVLDSDGSFFLYSKLTVDKSRWQQGNVFSXSVMHEALHNHYTQKSLSLSPGK

SEQ ID NO: 648 - protein, 456 aa, Artificial Sequence
  Synthesized sequence with two or more selenocysteine residues substituted for two or more cysteine residues
  VARIANT (1)...(456): Xaa = selenocysteine or cysteine
QVELVESGGGLVQPGGSLRLSXAASGFTFSSYAMSWVRQAPGKGLEWVSAINASGTRTYYADSVKGRFTISRDNSKNTLYLQMNSLRAEDTAVYYXARGKGNTHKPYGYVRYFDVWGQGTLVTVSSASTKGPSVFPLAPSSKSTSGGTAALGXLVKDYFPEPVTVSWNSGALTSGVHTFPAVLQSSGLYSLSSVVTVPSSSLGTQTYIXNVNHKPSNTKVDKKVEPKSXDKTHTXPPXPAPELLGGPSVFLFPPKPKDTLMISRTPEVTXVVVDVSHEDPEVKFNWYVDGVEVHNAKTKPREEQYNSTYRVVSVLTVLHQDWLNGKEYKXKVSNKALPAPIEKTISKAKGQPREPQVYTLPPSRDELTKNQVSLTXLVKGFYPSDIAVEWESNGQPENNYKTTPPVLDSDGSFFLYSKLTVDKSRWQQGNVFSXSVMHEALHNHYTQKSLSLSPGK

SEQ ID NO: 649 - protein, 445 aa, Artificial Sequence
  Synthesized sequence with two or more selenocysteine residues substituted for two or more cysteine residues
  VARIANT (1)...(445): Xaa = selenocysteine or cysteine
QVQLQESGPGLVKPSQTLSLTXSFSGFSLSTSGMGVGWIRQPSGKGLEWLAHIWWDGDESYNPSLKSRLTISKDTSKNQVSLKITSVTAADTAVYFXARNRYDPPWFVDWGQGTLVTVSSASTKGPSVFPLAPXSRSTSESTAALGXLVKDYFPEPVTVSWNSGALTSGVHTFPAVLQSSGLYSLSSVVTVTSSNFGTQTYTXNVDHKPSNTKVDKTVERKXXVEXPPXPAPPVAGPSVFLFPPKPKDTLMISRTPEVTXVVVDVSHEDPEVQFNWYVDGMEVHNAKTKPREEQFNSTFRVVSVLTVVHQDWLNGKEYKXKVSNKGLPAPIEKTISKTKGQPREPQVYTLPPSREEMTKNQVSLTXLVKGFYPSDIAVEWESNGQPENNYKTTPPMLDSDGSFFLYSKLTVDKSRWQQGNVFSXSVMHEALHNHYTQKSLSLSPG

SEQ ID NO: 650 - protein, 449 aa, Artificial Sequence
  Synthesized sequence with two or more selenocysteine residues substituted for two or more cysteine residues
  VARIANT (1)...(449): Xaa = selenocysteine or cysteine
DVKLVESGGGLVKLGGSLKLSXAASGFTFSNYYMSWVRQTPEKRLELVAAINSDGGITYYLDTVKGRFTISRDNAKNTLYLQMSSLKSEDTALFYXARHRSGYFSMDYWGQGTSVTVSSASTKGPSVFPLAPSSKSTSGGTAALGXLVKDYFPEPVTVSWNSGALTSGVHTFPAVLQSSGLYSLSSVVTVPSSSLGTQTYIXNVNHKPSNTKVDKKVEPKSXDKTHTXPPXPAPELLGGPSVFLFPPKPKDTLMISRTPEVTXVVVDVSHEDPEVKFNWYVDGVEVHNAKTKPREEQYNSTYRVVSVLTVLHQDWLNGKEYKXKVSNKALPAPIEKTISKAKGQPREPQVYTLPPSRDELTKNQVSLTXLVKGFYPSDIAVEWESNGQPENNYKTTPPVLDSDGSFFLYSKLTVDKSRWQQGNVFSXSVMHEALHNHYTQKSLSLSPGK

SEQ ID NO: 651 - protein, 445 aa, Artificial Sequence
  Synthesized sequence with two or more selenocysteine residues substituted for two or more cysteine residues
  VARIANT (1)...(445): Xaa = selenocysteine or cysteine
QVQLQESGPGLVKPSQTLSLTXTVSGGSISSFNYYWSWIRHHPGKGLEWIGYIYYSGSTYSNPSLKSRVTISVDTSKNQFSLTLSSVTAADTAVYYXARGYNWNYFDYWGQGTLVTVSSASTKGPSVFPLAPXSRSTSESTAALGXLVKDYFPEPVTVSWNSGALTSGVHTFPAVLQSSGLYSLSSVVTVPSSNFGTQTYTXNVDHKPSNTKVDKTVERKXXVEXPPXPAPPVAGPSVFLFPPKPKDTLMISRTPEVTXVVVDVSHEDPEVQFNWYVDGVEVHNAKTKPREEQFNSTFRVVSVLTVVHQDWLNGKEYKXKVSNKGLPAPIEKTISKTKGQPREPQVYTLPPSREEMTKNQVSLTXLVKGFYPSDIAVEWESNGQPENNYKTTPPMLDSDGSFFLYSKLTVDKSRWQQGNVFSXSVMHEALHNHYTQKSLSLSPGK

SEQ ID NO: 652 - protein, 446 aa, Artificial Sequence
  Synthesized sequence with two or more selenocysteine residues substituted for two or more cysteine residues
  VARIANT (1)...(446): Xaa = selenocysteine or cysteine
EVQLVQSGAEVKKPGESLKISXKGSGYSFSNYWIGWVRQMPGKGLEWMGIIDPSNSYTRYSPSFQGQVTISADKSISTAYLQWSSLKASDTAMYYXARWYYKPFDVWGQGTLVTVSSASTKGPSVFPLAPSSKSTSGGTAALGXLVKDYFPEPVTVSWNSGALTSGVHTFPAVLQSSGLYSLSSVVTVPSSSLGTQTYIXNVNHKPSNTKVDKKVEPKSXDKTHTXPPXPAPELLGGPSVFLFPPKPKDTLMISRTPEVTXVVVDVSHEDPEVKFNWYVDGVEVHNAKTKPREEQYNSTYRVVSVLTVLHQDWLNGKEYKXKVSNKALPAPIEKTISKAKGQPREPQVYTLPPSRDELTKNQVSLTXLVKGFYPSDIAVEWESNGQPENNYKTTPPVLDSDGSFFLYSKLTVDKSRWQQGNVFSXSVMHEALHNHYTQKSLSLSPG

SEQ ID NO: 653 - protein, 449 aa, Artificial Sequence
  Synthesized sequence with two or more selenocysteine residues substituted for two or more cysteine residues
  VARIANT (1)...(449): Xaa = selenocysteine or cysteine
QVQLQQSGPEVVKPGASVKMSXKASGYTFTSYVIHWVRQKPGQGLDWIGYINPYNDGTDYDEKFKGKATLTSDTSTSTAYMELSSLRSEDTAVYYXAREKDNYATGAWFAYWGQGTLVTVSSASTKGPSVFPLAPXSRSTSESTAALGXLVKDYFPEPVTVSWNSGALTSGVHTFPAVLQSSGLYSLSSVVTVPSSSLGTKTYTXNVDHKPSNTKVDKRVESKYGPPXPSXPAPEFLGGPSVFLFPPKPKDTLMISRTPEVTXVVVDVSQEDPEVQFNWYVDGVEVHNAKTKPREEQFNSTYRVVSVLTVLHQDWLNGKEYKXKVSNKGLPSSIEKTISKAKGQPREPQVYTLPPSQEEMTKNQVSLTXLVKGFYPSDIAVEWESNGQPENNYKTTPPVLDSDGSFFLYSRLTVDKSRWQEGNVFSXSVMHEALHNHYTQKSLSLSLGK

SEQ ID NO: 654 - protein, 456 aa, Artificial Sequence
  Synthesized sequence with two or more selenocysteine residues substituted for two or more cysteine residues
  VARIANT (1)...(456): Xaa = selenocysteine or cysteine
QAQVVESGGGVVQSGRSLRLSXAASGFAFSSYGMHWVRQAPGKGLEWVAVIWYDGSNKYYADSVRGRFTISRDNSENTLYLQMNSLRAEDTAVYYXARDHYGSGVHHYFYYGLDVWGQGTTVTVSSASTKGPSVFPLAPSSKSTSGGTAALGXLVKDYFPEPVTVSWNSGALTSGVHTFPAVLQSSGLYSLSSVVTVPSSSLGTQTYIXNVNHKPSNTKVDKRVEPKSXDKTHTXPPXPAPELLGGPSVFLFPPKPKDTLMISRTPEVTXVVVDVSHEDPEVKFNWYVDGVEVHNAKTKPREEQYNSTYRVVSVLTVLHQDWLNGKEYKXKVSNKALPAPIEKTISKAKGQPREPQVYTLPPSREEMTKNQVSLTXLVKGFYPSDIAVEWESNGQPENNYKTTPPVLDSDGSFFLYSKLTVDKSRWQQGNVFSXSVMHEALHNHYTQKSLSLSPGK

SEQ ID NO: 655 - protein, 448 aa, Artificial Sequence
  Synthesized sequence with two or more selenocysteine residues substituted for two or more cysteine residues
  VARIANT (1)...(448): Xaa = selenocysteine or cysteine
QVQLVQSGAEVKKPGASVKVSXKASGYTFTGYWMNWVRQAPGQGLEWMGDIYPGSGNTNYDEKFQGRVTMTRDTSISTAYMELSRLRSDDTAVYYXARGGYYEDFDSWGQGTTVTVSSASTKGPSVFPLAPSSKSTSGGTAALGXLVKDYFPEPVTVSWNSGALTSGVHTFPAVLQSSGLYSLSSVVTVPSSSLGTQTYIXNVNHKPSNTKVDKRVEPKSXDKTHTXPPXPAPELLGGPSVFLFPPKPKDTLMISRTPEVTXVVVDVSHEDPEVKFNWYVDGVEVHNAKTKPREEQYNSTYRVVSVLTVLHQDWLNGKEYKXKVSNKALPAPIEKTISKAKGQPREPQVYTLPPSREEMTKNQVSLTXLVKGFYPSDIAVEWESNGQPENNYKTTPPVLDSDGSFFLYSKLTVDKSRWQQGNVFSXSVMHEALHNHYTQKSLSLSPGK

SEQ ID NO: 656 - protein, 448 aa, Artificial Sequence
  Synthesized sequence with two or more selenocysteine residues substituted for two or more cysteine residues
  VARIANT (1)...(448): Xaa = selenocysteine or cysteine
EVQLLESGGGLVQPGGSLRLSXAASGFTFSIYSMNWVRQAPGKGLEWVSSIGSSGGTTYYADSVKGRFTISRDNSKNTLYLQMNSLRAEDTAVYYXAGSQWLYGMDVWGQGTTVTVSSASTKGPSVFPLAPSSKSTSGGTAALGXLVKDYFPEPVTVSWNSGALTSGVHTFPAVLQSSGLYSLSSVVTVPSSSLGTQTYIXNVNHKPSNTKVDKRVEPKSXDKTHTXPPXPAPELLGGPSVFLFPPKPKDTLMISRTPEVTXVVVDVSHEDPEVKFNWYVDGVEVHNAKTKPREEQYNSTYRVVSVLTVLHQDWLNGKEYKXKVSNKALPAPIEKTISKAKGQPREPQVYTLPPSREEMTKNQVSLTXLVKGFYPSDIAVEWESNGQPENNYKTTPPVLDSDGSFFLYSKLTVDKSRWQQGNVFSXSVMHEALHNHYTQKSLSLSPGK

SEQ ID NO: 657 - protein, 449 aa, Artificial Sequence
  Synthesized sequence with two or more selenocysteine residues substituted for two or more cysteine residues
  VARIANT (1)...(449): Xaa = selenocysteine or cysteine
QVQLVQSGAEVKKPGSSVKVSXKASGFTFTDYKIHWVRQAPGQGLEWMGYFNPNSGYSTYAQKFQGRVTITADKSTSTAYMELSSLRSEDTAVYYXARLSPGGYYVMDAWGQGTTVTVSSASTKGPSVFPLAPSSKSTSGGTAALGXLVKDYFPEPVTVSWNSGALTSGVHTFPAVLQSSGLYSLSSVVTVPSSSLGTQTYIXNVNHKPSNTKVDKKVEPKSXDKTHTXPPXPAPELLGGPSVFLFPPKPKDTLMISRTPEVTXVVVDVSHEDPEVKFNWYVDGVEVHNAKTKPREEQYNSTYRVVSVLTVLHQDWLNGKEYKXKVSNKALPAPIEKTISKAKGQPREPQVYTLPPSRDELTKNQVSLTXLVKGFYPSDIAVEWESNGQPENNYKTTPPVLDSDGSFFLYSKLTVDKSRWQQGNVFSXSVMHEALHNHYTQKSLSLSPG

SEQ ID NO: 658 - protein, 451 aa, Artificial Sequence
  Synthesized sequence with two or more selenocysteine residues substituted for two or more cysteine residues
  VARIANT (1)...(451): Xaa = selenocysteine or cysteine
EVQLVESGGGLVRPGGSLRLSXAASGFTFSNYDMHWVRQATGKGLEWVSAITAAGDIYYPGSVKGRFTISRENAKNSLYLQMNSLRAGDTAVYYXARGRYSGSGSYYNDWFDPWGQGTLVTVSSASTKGPSVFPLAPXSRSTSESTAALGXLVKDYFPEPVTVSWNSGALTSGVHTFPAVLQSSGLYSLSSVVTVPSSSLGTKTYTXNVDHKPSNTKVDKRVESKYGPPXPPXPAPEFEGGPSVFLFPPKPKDTLMISRTPEVTXVVVDVSQEDPEVQFNWYVDGVEVHNAKTKPREEQFNSTYRVVSVLTVLHQDWLNGKEYKXKVSNKGLPSSIEKTISKAKGQPREPQVYTLPPSQEEMTKNQVSLTXLVKGFYPSDIAVEWESNGQPENNYKTTPPVLDSDGSFFLYSRLTVDKSRWQEGNVFSXSVMHEALHNHYTQKSLSLSLGK

SEQ ID NO: 659 - protein, 448 aa, Artificial Sequence
  Synthesized sequence with two or more selenocysteine residues substituted for two or more cysteine residues
  VARIANT (1)...(448): Xaa = selenocysteine or cysteine
QVQLQQSGSELMMPGASVKISXKATGYTFSNYWIEWVKQRPGHGLEWIGEILPGTGRTIYNEKFKGKATFTADISSNTVQMQLSSLTSEDSAVYYXARRDYYGNFYYAMDYWGQGTSVTVSSASTKGPSVFPLAPXSRSTSESTAALGXLVKDYFPEPVTVSWNSGALTSGVHTFPAVLQSSGLYSLSSVVTVPSSSLGTKTYTXNVDHKPSNTKVDKRVESKYGPPXPSXPAPEFLGGPSVFLFPPKPKDTLMISRTPEVTXVVVDVSQEDPEVQFNWYVDGVEVHNAKTKPREEQFNSTYRVVSVLTVLHQDWLNGKEYKXKVSNKGLPSSIEKTISKAKGQPREPQVYTLPPSQEEMTKNQVSLTXLVKGFYPSDIAVEWESNGQPENNYKTTPPVLDSDGSFFLYSRLTVDKSRWQEGNVFSXSVMHEALHNHYTQKSLSLSLG

SEQ ID NO: 660 - protein, 449 aa, Artificial Sequence
  Synthesized sequence with two or more selenocysteine residues substituted for two or more cysteine residues
  VARIANT (1)...(449): Xaa = selenocysteine or cysteine
QVQLQQWGAGLLKPSETLSLTXAVFGGSFSGYYWSWIRQPPGKGLEWIGEINHRGNTNDNPSLKSRVTISVDTSKNQFALKLSSVTAADTAVYYXARERGYTYGNFDHWGQGTLVTVSSASTKGPSVFPLAPSSKSTSGGTAALGXLVKDYFPEPVTVSWNSGALTSGVHTFPAVLQSSGLYSLSSVVTVPSSSLGTQTYIXNVNHKPSNTKVDKKVEPKSXDKTHTXPPXPAPELLGGPSVFLFPPKPKDTLMISRTPEVTXVVVDVSHEDPEVKFNWYVDGVEVHNAKTKPREEQYNSTYRVVSVLTVLHQDWLNGKEYKXKVSNKALPAPIEKTISKAKGQPREPQVYTLPPSRDELTKNQVSLTXLVKGFYPSDIAVEWESNGQPENNYKTTPPVLDSDGSFFLYSKLTVDKSRWQQGNVFSXSVMHEALHNHYTQKSLSLSPGK

SEQ ID NO: 661 - protein, 449 aa, Artificial Sequence; identical to SEQ ID NO: 660
  Synthesized sequence with two or more selenocysteine residues substituted for two or more cysteine residues
  VARIANT (1)...(449): Xaa = selenocysteine or cysteine

SEQ ID NO: 662 - protein, 451 aa, Artificial Sequence
  Synthesized sequence with two or more selenocysteine residues substituted for two or more cysteine residues
  VARIANT (1)...(451): Xaa = selenocysteine or cysteine
EVQLVESGGGLVQPGGSLRLSXAASGFTFSSSWMNWVRQAPGKGLEWVGRIYPGDGDTNYNVKFKGRFTISRDDSKNSLYLQMNSLKTEDTAVYYXARSGFITTVRDFDYWGQGTLVTVSSASTKGPSVFPLAPSSKSTSGGTAALGXLVKDYFPEPVTVSWNSGALTSGVHTFPAVLQSSGLYSLSSVVTVPSSSLGTQTYIXNVNHKPSNTKVDKRVEPKSXDKTHTXPPXPAPELLGGPSVFLFPPKPKDTLMISRTPEVTXVVVDVSHEDPEVKFNWYVDGVEVHNAKTKPREEQYNSTYRVVSVLTVLHQDWLNGKEYKXKVSNKALPAPIEKTISKAKGQPREPQVYTLPPSREEMTKNQVSLTXLVKGFYPSDIAVEWESNGQPENNYKTTPPVLDSDGSFFLYSKLTVDKSRWQQGNVFSXSVMHEALHNHYTQKSLSLSPGK

SEQ ID NO: 663 - protein, 467 aa, Artificial Sequence; identical to SEQ ID NO: 623
  Synthesized sequence with two or more selenocysteine residues substituted for two or more cysteine residues
  VARIANT (1)...(467): Xaa = selenocysteine or cysteine

SEQ ID NO: 664 - protein, 449 aa, Artificial Sequence
  Synthesized sequence with two or more selenocysteine residues substituted for two or more cysteine residues
  VARIANT (1)...(449): Xaa = selenocysteine or cysteine
QVQLVESGGGVVQPGRSRRLSXAASGFTFSRYTMHWVRQAPGKGLEWVAVISFDGSNKYYVDSVKGRFTISRDNSENTLYLQVNILRAEDTAVYYXAREARGSYAFDIWGQGTMVTVSSASTKGPSVFPLAPSSKSTSGGTAALGXLVKDYFPEPVTVSWNSGALTSGVHTFPAVLQSSGLYSLSSVVTVPSSSLGTQTYIXNVNHKPSNTKVDKKVEPKSXDKTHTXPPXPAPELLGGPSVFLFPPKPKDTLMISRTPEVTXVVVDVSHEDPEVKFNWYVDGVEVHNAKTKPREEQYNSTYRVVSVLTVLHQDWLNGKEYKXKVSNKALPAPIEKTISKAKGQPREPQVYTLPPSRDELTKNQVSLTXLVKGFYPSDIAVEWESNGQPENNYKTTPPVLDSDGSFFLYSKLTVDKSRWQQGNVFSXSVMHEALHNHYTQKSLSLSPGK

SEQ ID NO: 665 - protein, 450 aa, Artificial Sequence
  Synthesized sequence with two or more selenocysteine residues substituted for two or more cysteine residues
  VARIANT (1)...(450): Xaa = selenocysteine or cysteine
QVQLVQSGAEVAKPGTSVKLSXKASGYTFTDYWMQWVKQRPGQGLEWIGTIYPGDGDTGYAQKFQGKATLTADKSSKTVYMHLSSLASEDSAVYYXARGDYYGSNSLDYWGQGTSVTVSSASTKGPSVFPLAPSSKSTSGGTAALGXLVKDYFPEPVTVSWNSGALTSGVHTFPAVLQSSGLYSLSSVVTVPSSSLGTQTYIXNVNHKPSNTKVDKKVEPKSXDKTHTXPPXPAPELLGGPSVFLFPPKPKDTLMISRTPEVTXVVVDVSHEDPEVKFNWYVDGVEVHNAKTKPREEQYNSTYRVVSVLTVLHQDWLNGKEYKXKVSNKALPAPIEKTISKAKGQPREPQVYTLPPSRDELTKNQVSLTXLVKGFYPSDIAVEWESNGQPENNYKTTPPVLDSDGSFFLYSKLTVDKSRWQQGNVFSXSVMHEALHNHYTQKSLSLSPGK

SEQ ID NO: 666 - protein, 449 aa, Artificial Sequence
  Synthesized sequence with two or more selenocysteine residues substituted for two or more cysteine residues
  VARIANT (1)...(449): Xaa = selenocysteine or cysteine
EVQLVESGGGLVKPGGSLKLSXAASGFKFSRYAMSWVRQAPGKRLEWVATISSGGSYIYYPDSVKGRFTISRDNVKNTLYLQMSSLRSEDTAMYYXARRDYDLDYFDSWGQGTLVTVSSASTKGPSVFPLAPSSKSTSGGTAALGXLVKDYFPEPVTVSWNSGALTSGVHTFPAVLQSSGLYSLSSVVTVPSSSLGTQTYIXNVNHKPSNTKVDKKVEPKSXDKTHTXPPXPAPELLGGPSVFLFPPKPKDTLMISRTPEVTXVVVDVSHEDPEVKFNWYVDGVEVHNAKTKPREEQYNSTYRVVSVLTVLHQDWLNGKEYKXKVSNKALPAPIEKTISKAKGQPREPQVYTLPPSRDELTKNQVSLTXLVKGFYPSDIAVEWESNGQPENNYKTTPPVLDSDGSFFLYSKLTVDKSRWQQGNVFSXSVMHEALHNHYTQKSLSLSPGK

SEQ ID NO: 667 - protein, 445 aa, Artificial Sequence
  Synthesized sequence with two or more selenocysteine residues substituted for two or more cysteine residues
  VARIANT (1)...(445): Xaa = selenocysteine or cysteine
QVQLVQSGAEVKKPGSSVKVSXKASGYSFTDYHIHWVRQAPGQGLEWMGVINPMYGTTDYNQRFKGRVTITADESTSTAYMELSSLRSEDTAVYYXARYDYFTGTGVYWGQGTLVTVSSASTKGPSVFPLAPXSRSTSESTAALGXLVKDYFPEPVTVSWNSGALTSGVHTFPAVLQSSGLYSLSSVVTVPSSSLGTKTYTXNVDHKPSNTKVDKRVESKYGPPXPPXPAPEFLGGPSVFLFPPKPKDTLMISRTPEVTXVVVDVSQEDPEVQFNWYVDGVEVHNAKTKPREEQFNSTYRVVSVLTVLHQDWLNGKEYKXKVSNKGLPSSIEKTISKAKGQPREPQVYTLPPSQEEMTKNQVSLTXLVKGFYPSDIAVEWESNGQPENNYKTTPPVLDSDGSFFLYSRLTVDKSRWQEGNVFSXSVMHEALHNHYTQKSLSLSLG

SEQ ID NO: 668 - protein, 449 aa, Artificial Sequence; identical to SEQ ID NO: 501
  Synthesized sequence with two or more selenocysteine residues substituted for two or more cysteine residues
  VARIANT (1)...(449): Xaa = selenocysteine or cysteine

SEQ ID NO: 669 - protein, 223 aa, Artificial Sequence
  Synthesized sequence with two or more selenocysteine residues substituted for two or more cysteine residues
  VARIANT (1)...(223): Xaa = selenocysteine or cysteine
EVQLVQSGPELKKPGASVKVSXKASGYTFTNYGMNWVRQAPGQGLEWMGWINTYTGETTYADDFKGRFVFSLDTSVSTAYLQISSLKAEDTAVYYXEREGGVNNWGQGTLVTVSSASTKGPSVFPLAPSSKSTSGGTAALGXLVKDYFPEPVTVSWNSGALTSGVHTFPAVLQSSGLYSLSSVVTVPSSSLGTQTYIXNVNHKPSNTKVDKKVEPKSXDKTHT

SEQ ID NO: 670 - protein, 451 aa, Artificial Sequence
  Synthesized sequence with two or more selenocysteine residues substituted for two or more cysteine residues
  VARIANT (1)...(451): Xaa = selenocysteine or cysteine
EVQLLESGGGLVQPGGSLRLSXAASGFTFSHYIMMWVRQAPGKGLEWVSGIYSSGGITVYADSVKGRFTISRDNSKNTLYLQMNSLRAEDTAVYYXAYRRIGVPRRDEFDIWGQGTMVTVSSASTKGPSVFPLAPSSKSTSGGTAALGXLVKDYFPEPVTVSWNSGALTSGVHTFPAVLQSSGLYSLSSVVTVPSSSLGTQTYIXNVNHKPSNTKVDKRVEPKSXDKTHTXPPXPAPELLGGPSVFLFPPKPKDTLMISRTPEVTXVVVDVSHEDPEVKFNWYVDGVEVHNAKTKPREEQYNSTYRVVSVLTVLHQDWLNGKEYKXKVSNKALPAPIEKTISKAKGQPREPQVYTLPPSREEMTKNQVSLTXLVKGFYPSDIAVEWESNGQPENNYKTTPPVLDSDGSFFLYSKLTVDKSRWQQGNVFSXSVMHEALHNHYTQKSLSLSPG

SEQ ID NO: 671 - protein, 439 aa, Artificial Sequence
  Synthesized sequence with two or more selenocysteine residues substituted for two or more cysteine residues
  VARIANT (1)...(439): Xaa = selenocysteine or cysteine
EVQLVESGGGLVQPGGSLRLSXAASGLTFSRYPMSWVRQAPGKGLVWVSAITSSGGSTYYSDTVKGRFTISRDNAKNTLYLQMNSLRAEDTAVYYXARLPDYWGQGTLVTVSSASTKGPSVFPLAPXSRSTSESTAALGXLVKDYFPEPVTVSWNSGALTSGVHTFPAVLQSSGLYSLSSVVTVPSSSLGTKTYTXNVDHKPSNTKVDKRVESKYGPPXPPXPAPEFLGGPSVFLFPPKPKDTLMISRTPEVTXVVVDVSQEDPEVQFNWYVDGVEVHNAKTKPREEQFNSTYRVVSVLTVLHQDWLNGKEYKXKVSNKGLPSSIEKTISKAKGQPREPQVYTLPPSQEEMTKNQVSLTXLVKGFYPSDIAVEWESNGQPENNYKTTPPVLDSDGSFFLYSRLTVDKSRWQEGNVFSXSVMHEALHNHYTQKSLSLSLG

SEQ ID NO: 672 - protein, 448 aa, Artificial Sequence
  Synthesized sequence with two or more selenocysteine residues substituted for two or more cysteine residues
  VARIANT (1)...(448): Xaa = selenocysteine or cysteine
QVQLVQSGAEVAKPGASVKLSXKASGYTFTSYWMQWVKQRPGQGLEXIGTIYPGDGDTTYTQKFQGKATLTADKSSSTAYMQLSSLRSEDSAVYYXARYDAPGYAMDYWGQGTLVTVSSASTKGPSVFPLAPSSKSTSGGTAALGXLVKDYFPEPVTVSWNSGALTSGVHTFPAVLQSSGLYSLSSVVTVPSSSLGTQTYIXNVNHKPSNTKVDKKVEPKSXDKTHTXPPXPAPELLGGPSVFLFPPKPKDTLMISRTPEVTXVVVDVSHEDPEVKFNWYVDGVEVHNAKTKPREEQYNSTYRVVSVLTVLHQDWLNGKEYKXKVSNKALPAPIEKTISKAKGQPREPQVYTLPPSRDELTKNQVSLTXLVKGFYPSDIAVEWESNGQPENNYKTTPPVLDSDGSFFLYSKLTVDKSWRQQGNVFSXSVMHEALHNHYTQKSLSLSPG

SEQ ID NO: 673 - protein, 445 aa, Artificial Sequence
  Synthesized sequence with two or more selenocysteine residues substituted for two or more cysteine residues
  VARIANT (1)...(445): Xaa = selenocysteine or cysteine
QVTLRESGPALVKPTQTLTLTXTVSGFSLSAYSVNWIRQPPGKALEWLAMIWGDGKIVYNSALKSRLTISKDTSKNQVVLTMTNMDPVDTATYYXAGDGYYPYAMDNWGQGSLVTVSSASTKGPSVFPLAPXSRSTSESTAALGXLVKDYFPEPVTVSWNSGALTSGVHTFPAVLQSSGLYSLSSVVTVPSSSLGTKTYTXNVDHKPSNTKVDKRVESKYGPPXPPXPAPEFLGGPSVFLFPPKPKDTLMISRTPEVTXVVVDVSQEDPEVQFNWYVDGVEVHNAKTKPREEQFNSTYRVVSVLTVLHQDWLNGKEYKXKVSNKGLPSSIEKTISKAKGQPREPQVYTLPPSQEEMTKNQVSLTXLVKGFYPSDIAVEWESNGQPENNYKTTPPVLDSDGSFFLYSRLTVDKSRWQEGNVFSXSVMHEALHNHYTQKSLSLSLGK

SEQ ID NO: 674 - protein, 446 aa, Artificial Sequence
  Synthesized sequence with two or more selenocysteine residues substituted for two or more cysteine residues
  VARIANT (1)...(446): Xaa = selenocysteine or cysteine
QVQLVQSGAEVKKPGASVKVSXKASGYTFTDYSMDWVRQAPGQGLEWMGAIHLNTGYTNYNQKFKGRVTMTRDTSTSTVYMELSSLRSEDTAVYYXARGFYDGYSPMDYWGQGTTVTVSSASTKGPSVFPLAPXSRSTSESTAALGXLVKDYFPEPVTVSWNSGALTSGVHTFPAVLQSSGLYSLSSVVTVPSSNFGTQTYTXNVDHKPSNTKVDKTVERKXXVEXPPXPAPPVAGPSVFLFPPKPKDTLMISRTPEVTXVVVDVSQEDPEVQFNWYVDGVEVHNAKTKPREEQFNSTYRVVSVLTVLHQDWLNGKEYKXKVSNKGLPSSIEKTISKAKGQPREPQVYTLPPSQEEMTKNQVSLTXLVKGFYPSDIAVEWESNGQPENNYKTTPPVLDSDGSFFLYSRLTVDKSRWQEGNVFSXSVMHEALHNHYTQKSLSLSLGK

SEQ ID NO: 675 - protein, 449 aa, Artificial Sequence
  Synthesized sequence with two or more selenocysteine residues substituted for two or more cysteine residues
  VARIANT (1)...(449): Xaa = selenocysteine or cysteine
QVQLVQSGAEVKKPGASVKVSXKASGYSFTNYYIHWVRQAPGQRLEWMGWINAGNGNTKYSQKFQGRVTITRDTSASTAYMELSSLRSEDTAVYYXVRRQRFPYYFDYWGQGTLVTVSSASTKGPSVFPLAPSSKSTSGGTAALGXLVKDYFPEPVTVSWNSGALTSGVHTFPAVLQSSGLYSLSSVVTVPSSSLGTQTYIXNVNHKPSNTKVDKRVEPKSXDKTHTXPPXPAPELLGGPSVFLFPPKPKDTLMISRTPEVTXVVVDVSHEDPEVKFNWYVDGVEVHNAKTKPREEQYNSTYRVVSVLTVLHQDWLNGKEYKXKVSNKALPAPIEKTISKAKGQPREPQVYTLPPSREEMTKNQVSLTXLVKGFYPSDIAVEWESNGQPENNYKTTPPVLDSDGSFFLYSKLTVDKSRWQQGNVFSXSVMHEALHNHYTQKSLSLSPGK

SEQ ID NO: 676 - protein, 451 aa, Artificial Sequence
  Synthesized sequence with two or more selenocysteine residues substituted for two or more cysteine residues
  VARIANT (1)...(451): Xaa = selenocysteine or cysteine
EVQLVQSGGGVERPGGSLRLSXAASGFTFDDYGMSWVRQAPGKGLEWVSGINWNGGSTGYADSVKGRVTISRDNAKNSLYLQMNSLRAEDTAVYYXAKILGAGRGWYFDLWGKGTTVTVSSASTKGPSVFPLAPSSKSTSGGTAALGXLVKDYFPEPVTVSWNSGALTSGVHTFPAVLQSSGLYSLSSVVTVPSSSLGTQTYIXNVNHKPSNTKVDKRVEPKSXDKTHTXPPXPAPELLGGPSVFLFPPKPKDTLMISRTPEVTXVVVDVSHEDPEVKFNWYVDGVEVHNAKTKPREEQYNSTYRVVSVLTVLHQDWLNGKEYKXKVSNKALPAPIEKTISKAKGQPREPQVYTLPPSREEMTKNQVSLTXLVKGFYPSDIAVEWESNGQPENNYKTTPPVLDSDGSFFLYSKLTVDKSRWQQGNVFSXSVMHEALHNHYTQKSLSLSPGK

SEQ ID NO: 677 - protein, 450 aa, Artificial Sequence
  Synthesized sequence with two or more selenocysteine residues substituted for two or more cysteine residues
  VARIANT (1)...(450): Xaa = selenocysteine or cysteine
EVQLVESGGGLVQPGGSLRLSXAASGFSFSDFAMSWVRQAPGKGLEWVATIGRVAFHTYYPDSMKGRFTISRDNSKNTLYLQMNSLRAEDTAVYYXARHRGFDVGHFDFWGQGTLVTVSSASTKGPSVFPLAPSSKSTSGGTAALGXLVKDYFPEPVTVSWNSGALTSGVHTFPAVLQSSGLYSLSSVVTVPSSSLGTQTYIXNVNHKPSNTKVDKKVEPKSXDKTHTXPPXPAPELLGGPSVFLFPPKPKDTLMISRTPEVTXVVVDVSHEDPEVKFNWYVDGVEVHNAKTKPREEQYNSTYRVVSVLTVLHQDWLNGKEYKXKVSNKALPAPIEKTISKAKGQPREPQVYTLPPSREEMTKNQVSLTXLVKGFYPSDIAVEWESNGQPENNYKTTPPVLDSDGSFFLYSKLTVDKSRWQQGNVFSXSVMHEALHNHYTQKSLSLSPGK

SEQ ID NO: 678 - protein, 453 aa, Artificial Sequence
  Synthesized sequence with two or more selenocysteine residues substituted for two or more cysteine residues
  VARIANT (1)...(453): Xaa = selenocysteine or cysteine
QVQLVQSGAEVMKPGSSVKVSXKASGYTFSWYWLEWVRQAPGHGLEWMGEIDPGTFTTNYNEKFKARVTFTADTSTSTAYMELSSLRSEDTAVYYXARFSHFSGSNYDYFDYWGQGTLVTVSSASTKGPSVFPLAPSSKSTSGGTAALGXLVKDYFPEPVTVSWNSGALTSGVHTFPAVLQSSGLYSLSSVVTVPSSSLGTQTYIXNVNHKPSNTKVDKKVEPKSXDKTHTXPPXPAPELLGGPSVFLFPPKPKDTLMISRTPEVTXVVVDVSHEDPEVKFNWYVDGVEVHNAKTKPREEQYNSTYRVVSVLTVLHQDWLNGKEYKXKVSNKALPAPIEKTISKAKGQPREPQVYTLPPSRDELTKNQVSLTXLVKGFYPSDIAVEWESNGQPENNYKTTPPVLDSDGSFFLYSKLTVDKSRWQQGNVFSXSVMHEALHNHYTQKSLSLSPGK

SEQ ID NO: 679 - protein, 443 aa, Artificial Sequence
  Synthesized sequence with two or more selenocysteine residues substituted for two or more cysteine residues
  VARIANT (1)...(443): Xaa = selenocysteine or cysteine
EIQLQQSGPELVKPGASVKVSXKASGYSFTDYNMYWVKQSHGKSLEWIGYIDPYNGDTTYNQKFKGKATLTVDKSSSTAFIHLNSLTSEDSAVYYXARSPYGHYAMDYWGQGTSVTVSSAKTTPPSVYPLAPGSAAQTNSMVTLGXLVKGYFPEPVTVTWNSGSLSSGVHTFPAVLQSDLYTLSSSVTVPSSTWPSETVTXNVAHPASSTKVDKKIVPRDXGXKPXIXTVPEVSSVFIFPPKPKDVLTITLTPKVTXVVVDISKDDPEVQFSWFVDDVEVHTAQTQPREEQFNSTFRSVSELPIMHQDWLNGKEFKXRVNSAAFPAPIEKTISKTKGRPKAPQVYTIPPPKEQMAKDKVSLTXMITDFFPEDITVEWQWNGQPAENYKNTQPIMDTDGSYFVYSKLNVQKSNWEAGNTFTXSVLHEGLHNHHTEKSLSHSPGK

SEQ ID NO: 680 - protein, 450 aa, Artificial Sequence
  Synthesized sequence with two or more selenocysteine residues substituted for two or more cysteine residues
  VARIANT (1)...(450): Xaa = selenocysteine or cysteine
QVQLVQSGAEVKKPGSSVKVSXKASGGTFSFYAISWVRQAPGQGLEWMGGFIPIFGAANYAQKFQGRVTITADESTSTAYMELSSLRSDDTAVYYXARIPSGSYYYDYDMDVWGQGTTVTVSSASTKGPSVFPLAPXSRSTSESTAALGXLVKDYFPEPVTVSWNSGALTSGVHTFPAVLQSSGLYSLSSVVTVPSSSLGTKTYTXNVDHKPSNTKVDKRVESKYGPPXPPXPAPEFLGGPSVFLFPPKPKDTLMISRTPEVTXVVVDVSQEDPEVQFNWYVDGVEVHNAKTKPREEQFNSTYRVVSVLTVLHQDWLNGKEYKXKVSNKGLPSSIEKTISKAKGQPREPQVYTLPPSQEEMTKNQVSLTXLVKGFYPSDIAVEWESNGQPENNYKTTPPVLDSDGSFFLYSRLTVDKSRWQEGNVFSXSVMHEALHNHYTQKSLSLSLGK

SEQ ID NO: 681 - protein, 448 aa, Artificial Sequence
  Synthesized sequence with two or more selenocysteine residues substituted for two or more cysteine residues
  VARIANT (1)...(448): Xaa = selenocysteine or cysteine
QVQLVQSGAEVKKPGASVKVSXKASGYTFSTMYMSWVRQAPGQGLEWMGRIDPANEHTNYAQKFQGRVTMTRDTSISTAYMELSRLTSDDTAVYYXARSYYYYNMDYWGQGTLVTVSSASTKGPSVFPLAPSSKSTSGGTAALGXLVKDYFPEPVTVSWNSGALTSGVHTFPAVLQSSGLYSLSSVVTVPSSSLGTQTYIXNVNHKPSNTKVDKRVEPKSXDKTHTXPPXPAPEAAGGPSVFLFPPKPKDTLMISRTPEVTXVVVDVSHEDPEVKFNWYVDGVEVHNAKTKPREEQYNSTYRVVSVLTVLHQDWLNGKEYKXKVSNKALPAPIEKTISKAKGQPREPQVYTLPPSREEMTKNQVSLTXLVKGFYPSDIAVEWESNGQPENNYKTTPPVLDSDGSFFLYSKLTVDKSRWQQGNVFSXSVMHEALHNHYTQKSLSLSPGK

SEQ ID NO: 682 - protein, 448 aa, Artificial Sequence
  Synthesized sequence with two or more selenocysteine residues substituted for two or more cysteine residues
  VARIANT (1)...(448): Xaa = selenocysteine or cysteine
QVQLVESGGGVVQPGRSLRLSXAASGFTFSSFGMHWVRQAPGKGLEWVAYISSGSFTIYYADSVKGRFTISRDNSKNTLYLQMNSLRAEDTAVYYXARMRKGYAMDYWGQGTLVTVSSASTKGPSVFPLAPSSKSTSGGTAALGXLVKDYFPEPVTVSWNSGALTSGVHTFPAVLQSSGLYSLSSVVTVPSSSLGTQTYIXNVNHKPSNTKVDKKVEPKSXDKTHTXPPXPAPELLGGPSVFLFPPKPKDTLMISRTPEVTXVVVDVSHEDPEVKFNWYVDGVEVHNAKTKPREEQYNSTYRVVSVLTVLHQDWLNGKEYKXKVSNKALPAPIEKTISKAKGQPREPQVYTLPPSRDELTKNQVSLTXLVKGFYPSDIAVEWESNGQPENNYKTTPPVLDSDGSFFLYSKLTVDKSRWQQGNVFSXSVMHEALHNHYTQKSLSLSPGK

SEQ ID NO: 683 - protein, 450 aa, Artificial Sequence
  Synthesized sequence with two or more selenocysteine residues substituted for two or more cysteine residues
  VARIANT (1)...(450): Xaa = selenocysteine or cysteine
QVQLVESGGGVVQPGRSLRLSXAASGFTFSSYGMHWVRQAPGKGLEWVAVISYEESNRYHADSVKGRFTISRDNSKITLYLQMNSLRTEDTAVYYXARDGGIAAPGPDYWGQGTLVTVSSASTKGPSVFPLAPASKSTSGGTAALGXLVKDYFPEPVTVSWNSGALTSGVHTFPAVLQSSGLYSLSSVVTVPSSSLGTQTYIXNVNHKPSNTKVDKRVEPKSXDKTHTXPPXPAPELLGGPSVFLFPPKPKDTLMISRTPEVTXVVVDVSHEDPEVKFNWYVDGVEVHNAKTKPREEQYNSTYRVVSVLTVLHQDWLNGKEYKXKVSNKALPAPIEKTISKAKGQPREPQVYTLPPSREEMTKNQVSLTXLVKGFYPSDIAVEWESNGQPENNYKTTPPVLDSDGSFFLYSKLTVDKSRWQQGNVFSXSVMHEALHNHYTQKSLSLSPGK

SEQ ID NO: 684 - protein, 450 aa, Artificial Sequence
  Synthesized sequence with two or more selenocysteine residues substituted for two or more cysteine residues
  VARIANT (1)...(450): Xaa = selenocysteine or cysteine
QVQLQQSGPELVKPGASLKLSXTASGFNIKDTYIHWVKQRPEQGLEWIGRIYPTNGYTRYDPKFQDKATITADTSSNTAYLQVSRLTSEDTAVYYXSRWGGDGFYAMDYWGQGASVTVSSASTKGPSVFPLAPSSKSTSGGTAALGXLVKDYFPEPVTVSWNSGALTSGVHTFPAVLQSSGLYSLSSVVTVPSSSLGTQTYIXNVNHKPSNTKVDKRVEPKSXDKTHTXPPXPAPELVGGPSVFLLPPKPKDTLMISRTPEVTXVVVDVSHEDPEVKFNWYVDGVEVHNAKTKPPEEQYNSTLRVVSVLTVLHQDWLNGKEYKXKVSNKALPAPIEKTISKAKGQPREPQVYTLPPSRDELTKNQVSLTXLVKGFYPSDIAVEWESNGQPENNYKTTPLVLDSDGSFFLYSKLTVDKSRWQQGNVFSXSVMHEALHNHYTQKSLSLSPGK

SEQ ID NO: 685 - protein, 447 aa, Artificial Sequence
  Synthesized sequence with two or more selenocysteine residues substituted for two or more cysteine residues
  VARIANT (1)...(447): Xaa = selenocysteine or cysteine
QVQLVQSGAEVKKPGASVKVSXKVSGYTLTELSIHWVRQAPGKGLEWMGGFDPEENEIVYAQRFQGRVTMTEDTSTDTAYMELSSLRSEDTAVYYXAIVGSFSPLTLGLWGQGTMVTVSSASTKGPSVFPLAPXSRSTSESTAALGXLVKDYFPEPVTVSWNSGALTSGVHTFPAVLQSSGLYSLSSVVTVPSSSLGTKTYTXNVDHKPSNTKVDKRVESKYGPPXPSXPAPEFLGGPSVFLFPPKPKDTLMISRTPEVTXVVVDVSQEDPEVQFNWYVDGVEVHNAKTKPREEQFNSTYRVVSVLTVLHQDWLNGKEYKXKVSNKGLPSSIEKTISKAKGQPREPQVYTLPPSQEEMTKNQVSLTXLVKGFYPSDIAVEWESNGQPENNYKTTPPVLDSDGSFFLYSRLTVDKSRWQEGNVFSXSVMHEALHNHYTQKSLSLSLGK

SEQ ID NO: 686 - protein, 450 aa, Artificial Sequence
  Synthesized sequence with two or more selenocysteine residues substituted for two or more cysteine residues
  VARIANT (1)...(450): Xaa = selenocysteine or cysteine
QVQLQQSGSELKKPGASVKVSXKASGYTFTNYGVNWIKQAPGQGLQWMGWINPNTGEPTFDDDFKGRFAFSLDTSVSTAYLQISSLKADDTAVYFXSRSRGKNEAWFAYWGQGTLVTVSSASTKGPSVFPLAPSSKSTSGGTAALGXLVKDYFPEPVTVSWNSGALTSGVHTFPAVLQSSGLYSLSSVVTVPSSSLGTQTYIXNVNHKPSNTKVDKRVEPKSXDKTHTXPPXPAPELLGGPSVFLFPPKPKDTLMISRTPEVTXVVVDVSHEDPEVKFNWYVDGVEVHNAKTKPREEQYNSTYRVVSVLTVLHQDWLNGKEYKXKVSNKALPAPIEKTISKAKGQPREPQVYTLPPSREEMTKNQVSLTXLVKGFYPSDIAVEWESNGQPENNYKTTPPVLDSDGSFFLYSKLTVDKSRWQQGNVFSXSVMHEALHNHYTQKSLSLSPGK

SEQ ID NO: 687 - protein, 447 aa, Artificial Sequence
  Synthesized sequence with two or more selenocysteine residues substituted for two or more cysteine residues
  VARIANT (1)...(447): Xaa = selenocysteine or cysteine
QVQLVQSGAEVVKPGASVKISXKASGYTFTGYFMNWVKQSPGQSLEWIGRIHPYDGDTFYNQKFQGKATLTVDKSSNTAHMELLSLTSEDFAVYYXTRYDGSRAMDYWGQGTTVTVSSASTKGPSVFPLAPSSKSTSGGTAALGXLVKDYFPEPVTVSWNSGALTSGVHTFPAVLQSSGLYSLSSVVTVPSSSLGTQTYIXNVNHKPSNTKVDKKVEPKSXDKTHTXPPXPAPELLGGPSVFLFPPKPKDTLMISRTPEVTXVVVDVSHEDPEVKFNWYVDGVEVHNAKTKPREEQYNSTYRVVSVLTVLHQDWLNGKEYKXKVSNKALPAPIEKTISKAKGQPREPQVYTLPPSRDELTKNQVSLTXLVKGFYPSDIAVEWESNGQPENNYKTTPPVLDSDGSFFLYSKLTVDKSRWQQGNVFSXSVMHEALHNHYTQKSLSLSPG

SEQ ID NO: 688 - protein, 449 aa, Artificial Sequence
  Synthesized sequence with two or more selenocysteine residues substituted for two or more cysteine residues
  VARIANT (1)...(449): Xaa = selenocysteine or cysteine
EVQLVESGGDLVQPGRSLRLSXAASGFIFSNYGMSWVRQAPGKGLEWVATISSASTYSYYPDSVKGRFTISRDNAKNSLYLQMNSLRVEDTALYYXGRHSDGNFAFGYWGQGTLVTVSSASTKGPSVFPLAPSSKSTSGGTAALGXLVKDYFPEPVTVSWNSGALTSGVHTFPAVLQSSGLYSLSSVVTVPSSSLGTQTYIXNVNHKPSNTKVDKKVEPKSXDKTHTXPPXPAPELLGGPSVFLFPPKPKDTLMISRTPEVTXVVVDVSHEDPEVKFNWYVDGVEVHNAKTKPREEQYNSTYRVVSVLTVLHQDWLNGKEYKXKVSNKALPAPIEKTISKAKGQPREPQVYTLPPSRDELTKNQVSLTXLVKGFYPSDIAVEWESNGQPENNYKTTPPVLDSDGSFFLYSKLTVDKSRWQQGNVFSXSVMHEALHNHYTQKSLSLSPGK

SEQ ID NO: 689 - protein, 452 aa, Artificial Sequence
  Synthesized sequence with two or more selenocysteine residues substituted for two or more cysteine residues
  VARIANT (1)...(452): Xaa = selenocysteine or cysteine
QVQLVQSGAEVKKPGASVKVSXKASGYTFTSYWMNWVRQAPGQGLEWMGRIDPYDSETHYAQKLQGRVTMTTDTSTSTAYMELRSLRSDDTAVYYXARGGYDFDVGTLYWFFDVWGQGTTVTVSSASTKGPSVFPLAPXSRSTSESTAALGXLVKDYFPEPVTVSWNSGALTSGVHTFPAVLQSSGLYSLSSVVTVPSSSLGTKTYTXNVDHKPSNTKVDKRVESKYGPPXPPXPAPEFLGGPSVFLFPPKPKDTLMISRTPEVTXVVVDVSQEDPEVQFNWYVDGVEVHNAKTKPREEQFNSTYRVVSVLTVLHQDWLNGKEYKXKVSNKGLPSSIEKTISKAKGQPREPQVYTLPPSQEEMTKNQVSLTXLVKGFYPSDIAVEWESNGQPENNYKTTPPVLDSDGSFFLYSRLTVDKSRWQEGNVFSXSVMHEALHNHYTQKSLSLSLGK

SEQ ID NO: 690 - protein, 450 aa, Artificial Sequence
  Synthesized sequence with two or more selenocysteine residues substituted for two or more cysteine residues
  VARIANT (1)...(450): Xaa = selenocysteine or cysteine
QVTLRESGPALVKPTQTLTLTXTFSGFSLSTAGMSVGWIRQPPGKALEWLADIWWDDKKHYNPSLKDRLTISKDTSKNQVVLKVTNMDPADTATYYXARDMIFNFYFDVWGQGTTVTVSSASTKGPSVFPLAPSSKSTSGGTAALGXLVKDYFPEPVTVSWNSGALTSGVHTFPAVLQSSGLYSLSSVVTVPSSSLGTQTYIXNVNHKPSNTKVDKRVEPKSXDKTHTXPPXPAPELLGGPSVFLFPPKPKDTLMISRTPEVTXVVVDVSHEDPEVKFNWYVDGVEVHNAKTKPREEQYNSTYRVVSVLTVLHQDWLNGKEYKXKVSNKALPAPIEKTISKAKGQPREPQVYTLPPSREEMTKNQVSLTXLVKGFYPSDIAVEWESNGQPENNYKTTPPVLDSDGSFFLYSKLTVDKSRWQQGNVFSXSVMHEALHNHYTQKSLSLSPGK

SEQ ID NO: 691 - protein, 449 aa, Artificial Sequence
  Synthesized sequence with two or more selenocysteine residues substituted for two or more cysteine residues
  VARIANT (1)...(449): Xaa = selenocysteine or cysteine
QVQLVQSGAEVKKPGASVKVSXKAFGYPFTDYLLHWVRQAPGQGLEWVGWLNPYSGDTNYAQKFQGRVTMTRDTSISTAYMELSRLRSDDTAVYYXTRTTLISVYFDYWGQGTMVTVSSASTKGPSVFPLAPSSKSTSGGTAALGXLVKDYFPEPVTVSWNSGALTSGVHTFPAVLQSSGLYSLSSVVTVPSSSLGTQTYIXNVNHKPSNTKVDKKVEPKSXDKTHTXPPXPAPELLGGPSVFLFPPKPKDTLMISRTPEVTXVVVDVSHEDPEVKFNWYVDGVEVHNAKTKPREEQYNSTYRVVSVLTVLHQDWLNGKEYKXKVSNKALPAPIEKTISKAKGQPREPQVYTLPPSRDELTKNQVSLTXLVKGFYPSDIAVEWESNGQPENNYKTTPPVLDSDGSFFLYSKLTVDKSRWQQGNVFSXSVMHEALHNHYTQKSLSLSPGK

SEQ ID NO: 692 - protein, 458 aa, Artificial Sequence
  Synthesized sequence with two or more selenocysteine residues substituted for two or more cysteine residues
  VARIANT (1)...(458): Xaa = selenocysteine or cysteine
EVQLQQSGPDLVKPGASVKISXKASGYSFTGYYMHWVKQSPGKGLEWIGRINPNNGVTLYNQKFKDKATLTVDKSSTTAYMELRSLTSEDSAVYYXARSTMITNYVMDYWGQGTSVTVSSAKTTPPSVYPLAPGSAAQTNSMVTLGXLVKGYFPEPVTVTWNSGSLSSGVHTFPAVLQSDLYTLSSSVTVPSSTWPSETVTXNVAHPASSTKVDKKIVPRDSGGPSEKSEEINEKDLRKKSELQGTALGNLKQIYYYNSKAITSSEKSADQFLTNTLLFKGFFTGHPWYNDLLVDLGSTAATSEYEGSSVDLYGAYYGYQXAGGTPNKTAXMYGGVTLHDNNRLTEEKKVPINLWIDGKQTTVPIDKVKTSKKEVTVQELDLQARHYLHGKFGLYNSDSFGGKVQRGLIVFHSSEGSTVSYDLFDAQGQYPDTLLRIYRDNTTISSTSLSISLYLYTT

SEQ ID NO: 693 - protein, 444 aa, Artificial Sequence
  Synthesized sequence with two or more selenocysteine residues substituted for two or more cysteine residues
  VARIANT (1)...(444): Xaa = selenocysteine or cysteine
QVQVQESGPGLVAPSQTLSITXTVSGFSLTTSGVSWVRQPPGKGLEWLGVIWGDGSTNYHPSLKSRLSIKKDHSKSQVFLKLNSLTAADTATYYXAKGGYSLAHWGQGTLVTVSSASTKGPSVFLPAPSSKSTSGGTAALGXLVKDYFPEPVTVSWNSGALTSGVHTFPAVLQSSGLYSLSSVVTVPSSSLGTQTYIXNVNHKPSNTKVDKKVEPKSXDKTHTXPPXPAPELLGGPSVFLFPPKPKDTLMISRTPEVTXVVVDVSHEDPEVKFNWYVDGVEVHNAKTKPREEQYNSTYRVVSVLTVLHQDWLNGKEYKXKVSNKALPAPIEKTISKAKGQPREPQVYTLPPSRDELTKNQVSLTXLVKGFYPSDIAVEWESNGQPENNYKTTPPVLDSDGSFFLYSKLTVDKSRWQQGNVFSXSVMHEALHNHYTQKSLSLSPG

SEQ ID NO: 694 - protein, 452 aa, Artificial Sequence
  Synthesized sequence with two or more selenocysteine residues substituted for two or more cysteine residues
  VARIANT (1)...(452): Xaa = selenocysteine or cysteine
EVQLVESGGGLVQPGGSLRLSXAASGFTFSSYLMTWVRQAPGKGLEWVANIKQDGSEKYYVDSVKGRFTISRDNAKNSLNLQMNSLRAEDTAVYYXTRDGYSSGRHYGMDVWGQGTTVIVSSASTKGPSVFPLAPSSKSTSGGTAALGXLVKDYFPEPVTVSWNSGALTSGVHTFPAVLQSSGLYSLSSVVTVPSSSLGTQTYIXNVNHKPSNTKVDKRVEPKSXDKTHTXPPXPAPELLGGPSVFLFPPKPKDTLMISRTPEVTXVVVDVSHEDPEVKFNWYVDGVEVHNAKTKPREEQYNSTYRVVSVLTVLHQDWLNGKEYKXKVSNKALPAPIEKTISKAKGQPREPQVYTLPPSREEMTKNQVSLTXLVKGFYPSDIAVEWESNGQPENNYKTTPPVLDSDGSFFLYSKLTVDKSRWQQGNVFSXSVMHEALHNHYTQKSLSLSPGK

SEQ ID NO: 695 - protein, 447 aa, Artificial Sequence
  Synthesized sequence with two or more selenocysteine residues substituted for two or more cysteine residues
  VARIANT (1)...(447): Xaa = selenocysteine or cysteine
QVQLVQSGAEVKKPGASVKVSXKASGYTFTNYWMHWVRQAPGQGLEWMGDINPSNGRTSYKEKFKRRVTLSVDKSSSTAYMELSSLRSEDTAVYFXTIHYDDKYYPLMDYWGQGTLVTVSSASTKGPSVFPLAPXSRSTSESTAALGXLVKDYFPEPVTVSWNSGALTSGVHTFPAVLQSSGLYSLSSVVTVPSSNFGTQTYTXNVDHKPSNTKVDKTVERKXXVEXPPXPAPPVAGPSVFLFPPKPKDTLMISRTPEVTXVVVDVSHEDPEVQFNWYVDGVEVHNAKTKPREEQFNSTFRVVSVLTVVHQDWLNGKEYKXKVSNKGLPAPIEKTISKTKGQPREPQVYTLPPSREKMTKNQVSLTXLVKGFYPSDIAVEWESNGQPENNYKTTPPMLKSDGSFFLYSKLTVDKSRWQQGNVFSXSVMHEALHNHYTQKSLSLSPGK

SEQ ID NO: 696 - protein, 451 aa, Artificial Sequence
  Synthesized sequence with two or more selenocysteine residues substituted for two or more cysteine residues
  VARIANT (1)...(451): Xaa = selenocysteine or cysteine
QVQLQESGPGLVKPSQTLSLTXTVSGGSISSGDYYWSWIRQPPGKGLEWIGYIYYSGSTDYNPSLKSRVTMSVDTSKNQFSLKVNSVTAADTAVYYXARVSIFGVGTFDYWGQGTLVTVSSASTKGPSVLPLAPSSKSTSGGTAALGXLVKDYFPEPVTVSWNSGALTSGVHTFPAVLQSSGLYSLSSVVTVPSSSLGTQTYIXNVNHKPSNTKVDKRVEPKSXDKTHTXPPXPAPELLGGPSVFLFPPKPKDTLMISRTPEVTXVVVDVSHEDPEVKFNWYVDGVEVHNAKTKPREEQYNSTYRVVSVLTVLHQDWLNGKEYKXKVSNKALPAPIEKTISKAKGQPREPQVYTLPPSREEMTKNQVSLTXLVKGFYPSDIAVEWESNGQPENNYKTTPPVLDSDGSFFLYSKLTVDKSRWQQGNVFSXSVMHEALHNHYTQKSLSLSPGK

SEQ ID NO: 697 - protein, 445 aa, Artificial Sequence
  Synthesized sequence with two or more selenocysteine residues substituted for two or more cysteine residues
  VARIANT (1)...(445): Xaa = selenocysteine or cysteine
QVQLVQSGAEVKKPGASVKVSXKASGYTFTGYIMNWVRQAPGQGLEWMGLINPYNGGTDYNPQFQDRVTITADKSTSTAYMELSSLRSEDTAVYYXARDGYDDGPYTLETWGQGTLVTVSSASTKGPSVFPLAPSSKSTSGGTAALGXLVKDYFPEPVTVSWNSGALTSGVHTFPAVLQSSGLYSLSSVVTVPSSNFGTQTYTXNVDHKPSNTKVDKTVERKSXVEXPPXPAPPVAGPSVFLFPPKPKDTLMISRTPEVTXVVVDVSQEDPEVQFNWYVDGVEVHNAKTKPREEQFNSTFRVVSVLTVVHQDWLNGKEYKXKVSNKGLPAPIEKTISKTKGQPREPQVYTLPPSQEEMTKNQVSLTXLVKGFYPSDIAVEWESNGQPENNYKTTPPMLDSDGSFFLYSKLTVDKSRWQEGNVFSXSVMHEALHNHYTQKSLSLSP

SEQ ID NO: 698 - protein, 452 aa, Artificial Sequence
  Synthesized sequence with two or more selenocysteine residues substituted for two or more cysteine residues
  VARIANT (1)...(452): Xaa = selenocysteine or cysteine
EVQLVESGGGLVQPGGSLRLSXAASGFTFSSYDIHWVRQATGKGLEWVSAIGPAGDTYYPGSVKGRFTISRENAKNSLYLQMNSLRAGDTAVYYXARGLITFGGLIAPFDYWGQGTLVTVSSASTKGPSVFPLAPSSKSTSGGTAALGXLVKDYFPEPVTVSWNSGALTSGVHTFPAVLQSSGLYSLSSVVTVPSSSLGTQTYIXNVNHKPSNTKVDKKVEPKSXDKTHTXPPXPAPELLGGPSVFLFPPKPKDTLMISRTPEVTXVVVDVSHEDPEVKFNWYVDGVEVHNAKTKPREEQYNSTYRVVSVLTVLHQDWLNGKEYKXKVSNKALPAPIEKTISKAKGQPREPQVYTLPPSRDELTKNQVSLTXLVKGFYPSDIAVEWESNGQPENNYKTTPPVLDSDGSFFLYSKLTVDKSRWQQGNVFSXSVMHEALHNHYTQKSLSLSPGK

SEQ ID NO: 699 - protein, 440 aa, Artificial Sequence
  Synthesized sequence with two or more selenocysteine residues substituted for two or more cysteine residues
  VARIANT (1)...(440): Xaa = selenocysteine or cysteine
QVQLVESGGGVVQPGRSLRLDXKASGITFSNSGMHWVRQAPGKGLEWVAVIWYDGSKRYYADSVKGRFTISRDNSKNTLFLQMNSLRAEDTAVYYXATNDDYWGQGTLVTVSSASTKGPSVFPLAPXSRSTSESTAALGXLVKDYFPEPVTVSWNSGALTSGVHTFPAVLQSSGLYSLSSVVTVPSSSLGTKTYTXNVDHKPSNTKVDKRVESKYGPPXPPXPAPEFLGGPSVFLFPPKPKDTLMISRTPEVTXVVVDVSQEDPEVQFNWYVDGVEVHNAKTKPREEQFNSTYRVVSVLTVLHQDWLNGKEYKXKVSNKGLPSSIEKTISKAKGQPREPQVYTLPPSQEEMTKNQVSLTXLVKGFYPSDIAVEWESNGQPENNYKTTPPVLDSDGSFFLYSRLTVDKSRWQEGNVFSXSVMHEALHNHYTQKSLSLSLGK

SEQ ID NO: 700 - protein, 448 aa, Artificial Sequence
  Synthesized sequence with two or more selenocysteine residues substituted for two or more cysteine residues
  VARIANT (1)...(448): Xaa = selenocysteine or cysteine
QVQLVQSGAEVKKPGSSVKVSXKASGYAFSYSWINWVRQAPGQGLEWMGRIFPGDGDTDYNGKFKGRVTITADKSTSTAYMELSSLRSEDTAVYYXARNVFDGYWLVYWGQGTLVTVSSASTKGPSVFPLAPSSKSTSGGTAALGXLVKDYFPEPVTVSWNSGALTSGVHTFPAVLQSSGLYSLSSVVTVPSSSLGTQTYIXNVNHKPSNTKVDKKVEPKSXDKTHTXPPXPAPELLGGPSVFLFPPKPKDTLMISRTPEVTXVVVDVSHEDPEVKFNWYVDGVEVHNAKTKPREEQYNSTYRVVSVLTVLHQDWLNGKEYKXKVSNKALPAPIEKTISKAKGQPREPQVYTLPPSRDELTKNQVSLTXLVKGFYPSDIAVEWESNGQPENNYKTTPPVLDSDGSFFLYSKLTVDKSRWQQGNVFSXSVMHEALHNHYTQKSLSLSPG

SEQ ID NO: 701 - protein, 450 aa, Artificial Sequence
  Synthesized sequence with two or more selenocysteine residues substituted for two or more cysteine residues
  VARIANT (1)...(450): Xaa = selenocysteine or cysteine
EVQLVQSGAEVKKPGESLKISXKGSGRTFTSYNMHWVRQMPGKGLEWMGAIYPLTGDTSYNQKSKLQVTISADKSISTAYLQWSSLKASDTAMYYXARSTYVGGDWQFDVWGKGTTVTVSSASTKGPSVFPLAPSSKSTSGGTAALGXLVKDYFPEPVTVSWNSGALTSGVHTFPAVLQSSGLYSLSSVVTVPSSSLGTQTYIXNVNHKPSNTKVDKKVEPKSXDKTHTXPPXPAPELLGGPSVFLFPPKIKDTLMISRTPEVTXVVVDVSHEDPEVKFNWYVDGVEVHNAKTKPREEQYNSTYRVVSVLTVLHQDWLNGKEYKXKVSNKALPAPIEKTISKQKGQPREPQVYTLPPSRDELTKNQVSLTXLVKGFYPSDIAVEWESNGQPENNYKTTPPVLDSDGSFFLYSKLTVDKSRWQQGNVFSXSVMHEALHNHYTQKSLSLSPG

SEQ ID NO: 702 - protein, 450 aa, Artificial Sequence
  Synthesized sequence with two or more selenocysteine residues substituted for two or more cysteine residues
  VARIANT (1)...(450): Xaa = selenocysteine or cysteine
EVQLVESGGGLVQPGGSLRLSXAASGYTFTSYNMHWVRQAPGKGLEWVGAIYPGNGDTSYNQKFKGRFTISVDKSKNTLYLQMNSLRAEDTAVYYXARVVYYSNSYWYFDVWGQGTLVTVSSASTKGPSVFPLAPSSKSTSGGTAALGXLVKDYFPEPVTVSWNSGALTSGVHTFPAVLQSSGLYSLSSWTVPSSSLGTQTYIXNVNHKPSNTKVDKKVEPKSXDKTHTXPPXPAPELLGGPSVFLFPPKPKDTLMISRTPEVTXWVDVSHEDPEVKFNWYVDGVEVHNAKTKPREEQYNSTYRVVSVLTVLHQDWLNGKEYKXKVSNKALPAPIEKTISKAKGQPREPQVYTLPPSREEMTKNQVSLTXLVKGFYPSDIAVEWESNGQPENNYKTTPPVLDSDGSFFLYSKLTVDKSRWQQGNVFSXSVMHEALHNHYTQKSLSLSPGK

SEQ ID NO: 703 - protein, 457 aa, Artificial Sequence
  Synthesized sequence with two or more selenocysteine residues substituted for two or more cysteine residues
  VARIANT (1)...(457): Xaa = selenocysteine or cysteine
QLQLQESGPGLVKPSETLSLTXTVSGGSINSSSYYWGWLRQSPGKGLEWIGSFFYTGSTYYNPSLRSRLTISVDTSKNQFSLMLSSVTAADTAVYYXARQSTYYYGSGNYYGWFDRWDQGTLVTVSSASTKGPSVFPLAPSSKSTSGGTAALGXLVKDYFPEPVTVSWNSGALTSGVHTFPAVLQSSGLYSLSSVVTVPSSSLGTQTYIXNVNHKPSNTKVDKRVEPKSXDKTHTXPPXPAPELLGGPSVFLFPPKPKDTLMISRTPEVTXVVVDVSHEDPEVKFNWYVDGVEVHNAKTKPREEQYNSTYRVVSVLTVLHQDWLNGKEYKXKVSNKALPAPIEKTISKAKGQPREPQVYTLPPSREEMTKNQVSLTXLVKGFYPSDIAVEWESNGQPENNYKTTPPVLDSDGSFFLYSKLTVDKSRWQQGNVFSXSVMHEALHNHYTQKSLSLSPGK

SEQ ID NO: 704 - protein, 447 aa, Artificial Sequence
  Synthesized sequence with two or more selenocysteine residues substituted for two or more cysteine residues
  VARIANT (1)...(447): Xaa = selenocysteine or cysteine
EVQLVESGGGLVQPGGSLRLSXAASGFNFNDYFMNWVRQAPGKGLEWVAQMRNKNYQYGTYYAESLEGRFTISRDDSKNSLYLQMNSLKTEDTAVYYXARESYYGFTSYWGQGTLVTVSSASTKGPSVFPLAPXSRSTSESTAALGXLVKDYFPEPVTVSWNSGALTSGVHTFPAVLQSSGLYSLSSVVTVPSSSLGTKTYTXNVDHKPSNTKVDKRVESKYGPPXPPXPAPEFLGGPSVFLFPPKPKDTLMISRTPEVTXVVVDVSQEDPEVQFNWYVDGVEVHNAKTKPREEQFNSTYRVVSVLTVLHQDWLNGKEYKXKVSNKGLPSSIEKTISKAKGQPREPQVYTLPPSQEEMTKNQVSLTXLVKGFYPSDIAVEWESNGQPENNYKTTPPVLDSDGSFFLYSRLTVDKSRWQEGNVFSXSVMHEALHNHYTQKSLSLSLGK

SEQ ID NO: 705 - protein, 451 aa, Artificial Sequence
  Synthesized sequence with two or more selenocysteine residues substituted for two or more cysteine residues
  VARIANT (1)...(451): Xaa = selenocysteine or cysteine
EVQLVESGGGLVQPGGSLRLSXAVSGYSITSGYSWNWIRQAPGKGLEWVASITYDGSTNYNPSVKGRITISRDDSKNTFYLQMNSLRAEDTAVYYXARGSHYFGHWHFAVWGQGTLVTVSSASTKGPSVFPLAPSSKSTSGGTAALGXLVKDYFPEPVTVSWNSGALTSGVHTFPAVLQSSGLYSLSSVVTVPSSSLGTQTYIXNVNHKPSNTKVDKKVEPKSXDKTHTXPPXPAPELLGGPSVFLFPPKPKDTLMISRTPEVTXVVVDVSHEDPEVKFNWYVDGVEVHNAKTKPREEQYNSTYRVVSVLTVLHQDWLNGKEYKXKVSNKALPAPIEKTISKAKGQPREPQVYTLPPSREEMTKNQVSLTXLVKGFYPSDIAVEWESNGQPENNYKTTPPVLDSDGSFFLYSKLTVDKSRWQQGNVFSXSVMHEALHNHYTQKSLSLSPGK

SEQ ID NO: 706 - protein, 449 aa, Artificial Sequence
  Synthesized sequence with two or more selenocysteine residues substituted for two or more cysteine residues
  VARIANT (1)...(449): Xaa = selenocysteine or cysteine
EVQLVESGGGLVQPGGSLRLSXAASGYTFTSYWLHWVRQAPGKGLEWVGMIDPSNSDTRFNPNFKDRFTISADTSKNTAYLQMNSLRAEDTAVYYXATYRSYVTPLDYWGQGTLVTVSSASTKGPSVFPLAPSSKSTSGGTAALGXLVKDYFPEPVTVSWNSGALTSGVHTFPAVLQSSGLYSLSSVVTVPSSSLGTQTYIXNVNHKPSNTKVDKKVEPKSXDKTHTXPPXPAPELLGGPSVFLFPPKPKDTLMISRTPEVTXVVVDVSHEDPEVKFNWYVDGVEVHNAKTKPREEQYNSTYRVVSVLTVLHQDWLNGKEYKXKVSNKALPAPIEKTISKAKGQPREPQVYTLPPSREEMTKNQVSLSXAVKGFYPSDIAVEWESNGQPENNYKTTPPVLDSDGSFFLVSKLTVDKSRWQQGNVFSXSVMHEALHNHYTQKSLSLSPGK

SEQ ID NO: 707 - protein, 454 aa, Artificial Sequence
  Synthesized sequence with two or more selenocysteine residues substituted for two or more cysteine residues
  VARIANT (1)...(454): Xaa = selenocysteine or cysteine
QVQLQESGPGLVRPSQTLSLTXTASGYTFTDYVIHWVKQPPGRGLEWIGYINPYDDDTTYNQKFKGRVTMLVDTSSNTAYLRLSSVTAEDTAVYYXARRGNSYDGYFDYSMDYWGSGTPVTVSSASTKGPSVFPLAPSSKSTSGGTAALGXLVKDYFPEPVTVSWNSGALTSGVHTFPAVLQSSGLYSLSSVVTVPSSSLGTQTYIXNVNHKPSNTKVDKKVEPKSXDKTHTXPPXPAPELLGGPSVFLFPPKPKDTLMISRTPEVTXVVVDVSHEDPEVKFNWYVDGVEVHNAKTKPREEQYNSTYRVVSVLTVLHQDWLNGKEYKXKVSNKALPAPIEKTISKAKGQPREPQVYTLPPSRDELTKNQVSLTXLVKGFYPSDIAVEWESNGQPENNYKTTPPVLDSDGFFFLYSKLTVDKSRWQQGNVFSXSVMHEALHNHYTQKSLSLSPGK

SEQ ID NO: 708 - protein, 227 aa, Artificial Sequence
  Synthesized sequence with two or more selenocysteine residues substituted for two or more cysteine residues
  VARIANT (1)...(227): Xaa = selenocysteine or cysteine
EVQLLESGGGLVQPGGSLRLSXAASGFTFSIYPMFWVRQAPGKGLEWVSWIGPSGGITKYADSVKGRFTISRDNSKNTLYLQMNSLRAEDTATYYXAREGHNDWYFDLWGRGTLVTVSSASTKGPSVFPLAPXSRSTSESTAALGXLVKDYFPEPVTVSWNSGALTSGVHTFPAVLQSSGLYSLSSVVTVPSSNFGTQTYTXNVDHKPSNTKVDKTVERKXXVEXPP

SEQ ID NO: 709 - protein, 451 aa, Artificial Sequence
  Synthesized sequence with two or more selenocysteine residues substituted for two or more cysteine residues
  VARIANT (1)...(451): Xaa = selenocysteine or cysteine
EVQLLESGGGLVQPGGSLRLSXAASGFTFSNAWMSWVRQAPGKGLEWVSSISVGGHRTYYADSVKGRSTISRDNSKNTLYLQMNSLRAEDTAVYYXARIRVGPSGGAFDYWGQGTLVTVSSASTKGPSVFPLAPSSKSTSGGTAALGXLVKDYFPEPVTVSWNSGALTSGVHTFPAVLQSSGLYSLSSVVTVPSSSLGTQTYIXNVNHKPSNTKVDKKVEPKSXDKTHTXPPXPAPELLGGPSVFLFPPKPKDTLMISRTPEVTXVVVDVSHEDPEVKFNWYVDGVEVHNAKTKPREEQYNSTYRVVSVLTVLHQDWLNGKEYKXKVSNKALPAPIEKTISKAKGQPREPQVYTLPPSRDELTKNQVSLTXLVKGFYPSDIAVEWESNGQPENNYKTTPPVLDSDGSFFLYSKLTVDKSRWQQGNVFSXSVMHEALHNHYTQKSLSLSPGK

SEQ ID NO: 710 - protein, 449 aa, Artificial Sequence
  Synthesized sequence with two or more selenocysteine residues substituted for two or more cysteine residues
  VARIANT (1)...(449): Xaa = selenocysteine or cysteine
EVQLLESGGGLVQPGGSLRLSXAASGFTFSSFPMAWVRQAPGKGLEWVSTISTSGGRTYYRDSVKGRFTISRDNSKNTLYLQMNSLRAEDTAVYYXAKFRQYSGGFDYWGQGTLVTVSSASTKGPSVFPLAPSSKSTSGGTAALGXLVKDYFPEPVTVSWNSGALTSGVHTFPAVLQSSGLYSLSSVVTVPSSSLGTQTYIXNVNHKPSNTKVDKKVEPKSXDKTHTXPPXPAPELLGGPSVFLFPPKPKDTLMISRTPEVTXVVVDVSHEDPEVKFNWYVDGVEVHNAKTKPREEQYASTYRVVSVLTVLHQDWLNGKEYKXKVSNKALPAPIEKTISKAKGQPREPQVYTLPPSRDELTKNQVSLTXLVKGFYPSDIAVEWESNGQPENNYKTTPPVLDSDGSFFLYSKLTVDKSRWQQGNVFSXSVMHEALHNHYTQKSLSLSPGK

SEQ ID NO: 711 - protein, 449 aa, Artificial Sequence
  Synthesized sequence with two or more selenocysteine residues substituted for two or more cysteine residues
  VARIANT (1)...(449): Xaa = selenocysteine or cysteine
EVQLLESGGGLVQPGGSLRLSXAASGFTFNSYAMSWVRQAPGKGLEWVSIISGSGGFTYYADSVKGRFTISRDNSRTTLYLQMNSLRAEDTAVYYXAKDRLVAPGTFDYWGQGALVTVSSASTKGPSVFPLAPSSKSTSGGTAALGXLVKDYFPEPVTVSWNSGALTSGVHTFPAVLQSSGLYSLSSVVTVPSSSLGTQTYIXNVNHKPSNTKVDKKVEPKSXDKTHTXPPXPAPELLGGPSVFLFPPKPKDTLMISRTPEVTXVVVDVSHEDPEVKFNWYVDGVEVHNAKTKPREEQYNSTYRVVSVLTVLHQDWLNGKEYKXKVSNKALPAPIEKTISKAKGQPREPQVYTLPPSRDELTKNQVSLTXLVKGFYPSDIAVEWESNGQPENNYKTTPPVLDSDGSFFLYSKLTVDKSRWQQGNVFSXSVMHEALHNHYTQKSLSLSPG

SEQ ID NO: 712 - protein, 443 aa, Artificial Sequence
  Synthesized sequence with two or more selenocysteine residues substituted for two or more cysteine residues
  VARIANT (1)...(443): Xaa = selenocysteine or cysteine
QVQLVQSGAEVKKPGASVKVSXKASGYTFTSYWMHWVRQAPGQGLEWIGNINPSNGGTNYNEKFKSKATMTRDTSTSTAYMELSSLRSEDTAVYYXELMQGYWGQGTLVTVSSASTKGPSVFPLAPSSKSTSGGTAALGXLVKDYFPEPVTVSWNSGALTSGVHTFPAVLQSSGLYSLSSVVTVPSSSLGTQTYIXNVNHKPSNTKVDKKVEPKSXDKTHTXPPXPAPELAGAPSVFLFPPKPKDTLMISRTPEVTXVVVDVSHEDPEVKFNWYVDGVEVHNAKTKPREEQYNSTYRVVSVLTVLHQDWLNGKEYKXKVSNKALPAPIEKTISKAKGQPREPQVYTLPPSRDELTKNQVSLTXLVKGFYPSDIAVEWESNGQPENNYKTTPPVLDSDGSFFLYSKLTVDKSRWQQGNVFSXSVMHEALHNHYTQKSLSLSPGK

SEQ ID NO: 713 - protein, 450 aa, Artificial Sequence
  Synthesized sequence with two or more selenocysteine residues substituted for two or more cysteine residues
  VARIANT (1)...(450): Xaa = selenocysteine or cysteine
QVTLRESGPALVKPTQTLTLTXTFSGFSLSTSGMSVGWIRQPPGKALEWLADIWWDDKKDYNPSLKSRLTISKDTSKNQVVLKVTNMDPADTATYYXARSMITNWYFDVWGAGTTVTVSSASTKGPSVFPLAPSSKSTSGGTAALGXLVKDYFPEPVTVSWNSGALTSGVHTFPAVLQSSGLYSLSSVVTVPSSSLGTQTYIXNVNHKPSNTKVDKRVEPKSXDKTHTXPPXPAPELLGGPSVFLFPPKPKDTLMISRTPEVTXVVVDVSHEDPEVKFNWYVDGVEVHNAKTKPREEQYNSTYRVVSVLTVLHQDWLNGKEYKXKVSNKALPAPIEKTISKAKGQPREPQVYTLPPSREEMTKNQVSLTXLVKGFYPSDIAVEWESNGQPENNYKTTPPVLDSDGSFFLYSKLTVDKSRWQQGNVFSXSVMHEALHNHYTQKSLSLSPGK

SEQ ID NO: 714 - protein, 449 aa, Artificial Sequence
  Synthesized sequence with two or more selenocysteine residues substituted for two or more cysteine residues
  VARIANT (1)...(449): Xaa = selenocysteine or cysteine
EGQLVQSGGGLVHPGGSLRLSXAGSGFTFSSYGMHWVRQAPGKGLEWVSGIGTGGGTYSTDSVKGRFTISRDNAKNSLYLQMNSLRAEDMAVYYXARGDYYGSGSFFDXWGQGTLVTVSSASTKGPSVFPLAPSSKSTSGGTAALGXLVKDYFPEPVTVSWNSGALTSGVHTFPAVLQSSGLYSLSSVVTVPSSSLGTQTYIXNVNHKPSNTKVDKRVEPKSXDKTHTXPPXPAPELLGGPSVFLFPPKPKDTLMISRTPEVTXVVVDVSHEDPEVKFNWYVDGVEVHNAKTKPREEQYNSTYRVVSVLTVLHQDWLNGKEYKXKVSNKALPAPIEKTISKAKGQPREPQVYTLPPSREEMTKNQVSLTXLVKGFYPSDIAVEWESNGQPENNYKTTPPVLDSDGSFFLYSKLTVDKSRWQQGNVFSXSVMHEALHNHYTQKSLSLSPG

SEQ ID NO: 715 - protein, 445 aa, Artificial Sequence
  Synthesized sequence with two or more selenocysteine residues substituted for two or more cysteine residues
  VARIANT (1)...(445): Xaa = selenocysteine or cysteine
QVQLQESGPGLVKPSETLSLTXTVSGGSVSSGDYYWTWIRQSPGKGLEWIGHIYYSGNTNYNPSLKSRLTISIDTSKTQFSLKLSSVTAADTAIYYXVRDRVTGAFDIWGQGTMVTVSSASTKGPSVFPLAPXSRSTSESTAALGXLVKDYFPEPVTVSWNSGALTSGVHTFPAVLQSSGLYSLSSVVTVPSSNFGTQTYTXNVDHKPSNTKVDKTVERKXXVEXPPXPAPPVAGPSVFLFPPKPKDTLMISRTPEVTXVVVDVSHEDPEVQFNWYVDGVEVHNAKTKPREEQFNSTFRVVSVLTVVHQDWLNGKEYKXKVSNKGLPAPIEKTISKTKGQPREPQVYTLPPSREEMTKNQVSLTXLVKGFYPSDIAVEWESNGQPENNYKTTPPMLDSDGSFFLYSKLTVDKSRWQQGNVFSXSVMHEALHNHYTQKSLSLSPGK

SEQ ID NO: 716 - protein, 453 aa, Artificial Sequence
  Synthesized sequence with two or more selenocysteine residues substituted for two or more cysteine residues
  VARIANT (1)...(453): Xaa = selenocysteine or cysteine
EVQLVESGGGLVQPGGSLRLSXAASGYTFIDYYMNWVRQAPGKGLEWVGDINLDNSGTHYNQKFKGRFTISRDKSKNTAYLQMNSLRAEDTAVYYXAREGVYHDYDDYAMDYWGQGTLVTVSSASTKGPSVFPLAPSSKSTSGGTAALGXLVKDYFPEPVTVSWNSGALTSGVHTFPAVLQSSGLYSLSSVVTVPSSSLGTQTYIXNVNHKPSNTKVDKKVEPKSXDKTHTXPPXPAPELLGGPSVFLFPPKPKDTLMISRTPEVTXVVVDVSHEDPEVKFNWYVDGVEVHNAKTKPREEQYNSTYRVVSVLTVLHQDWLNGKEYKXKVSNKALPAPIEKTISKAKGQPREPQVYTLPPSREEMTKNQVSLTXLVKGFYPSDIAVEWESNGQPENNYKTTPPVLDSDGSFFLYSKLTVDKSRWQQGNVFSXSVMHEALHNHYTQKSLSLSPGK

SEQ ID NO: 717 - protein, 447 aa, Artificial Sequence
  Synthesized sequence with two or more selenocysteine residues substituted for two or more cysteine residues
  VARIANT (1)...(447): Xaa = selenocysteine or cysteine
EVQLVESGGGLVQPGGSLRLSXAASGYTFTSYVIHWVRQAPGKGLEWVGYNNPYNAGTNYNEKFKGRFTISSDKSKNTAYLQMNSLRAEDTAVYYXSRPTMLPWFAYWGQGTLVTVSSASTKGPSVFPLAPSSKSTSGGTAALGXLVKDYFPEPVTVSWNSGALTSGVHTFPAVLQSSGLYSLSSVVTVPSSSLGTQTYIXNVNHKPSNTKVDKKVEPKSXDKTHTXPPXPAPELLGGPSVFLFPPKPKDTLMISRTPEVTXVVVDVSHEDPEVKFNWYVDGVEVHNAKTKPREEQYNSTYRVVSVLTVLHQDWLNGKEYKXKVSNKALPAPIEKTISKAKGQPREPQVYTLPPSREEMTKNQVSLTXLVKGFYPSDIAVEWESNGQPENNYKTTPPVLDSDGSFFLYSKLTVDKSRWQQGNVFSXSVMHEALHNHYTQKSLSLSPG

SEQ ID NO: 718 - protein, 447 aa, Artificial Sequence
  Synthesized sequence with two or more selenocysteine residues substituted for two or more cysteine residues
  VARIANT (1)...(447): Xaa = selenocysteine or cysteine
QVQLQQWGAGLLKPSETLSLTXAVYGGSFSGYYWSWIRQPPGKGLEWIGEINHSGSTNYNPSLKSRVTISVETSKNQFSLKLSSVTAADTAVYYXARDKWTWYFDLWGRGTLVTVSSASTKGPSVFPLAPSSKSTSGGTAALGXLVKDYFPEPVTVSWNSGALTSGVHTFPAVLQSSGLYSLSSVVTVPSSSLGTQTYIXNVNHKPSNTKVDKRVEPKSXDKTHTXPPXPAPELLGGPSVFLFPPKPKDTLMISRTPEVTXVVVDVSHEDPEVKFNWYVDGVEVHNAKTKPREEQYNSTYRVVSVLTVLHQDWLNGKEYKXKVSNKALPAPIEKTISKAKGQPREPQVYTLPPSREEMTKNQVSLTXLVKGFYPSDIAVEWESNGQPENNYKTTPPVLDSDGSFFLYSKLTVDKSRWQQGNVFSXSVMHEALHNHYTQKSLSLSPGK

SEQ ID NO: 719 - protein, 447 aa, Artificial Sequence
  Synthesized sequence with two or more selenocysteine residues substituted for two or more cysteine residues
  VARIANT (1)...(447): Xaa = selenocysteine or cysteine
QVQLVQSGVEVKKPGASVKVSXKASGYTFTNYYMYWVRQAPGQGLEWMGGINPSNGGTNFNEKFKNRVTLTTDSSTTTAYMELKSLQFDDTAVYYXARRDYRFDMGFDYWGQGTTVTVSSASTKGPSVFPLAPXSRSTSESTAALGXLVKDYFPEPVTVSWNSGALTSGVHTFPAVLQSSGLYSLSSVVTVPSSSLGTKTYTXNVDHKPSNTKVDKRVESKYGPPXPPXPAPEFLGGPSVFLFPPKPKDTLMISRTPEVTXVVVDVSQEDPEVQFNWYVDGVEVHNAKTKPREEQFNSTYRVVSVLTVLHQDWLNGKEYKXKVSNKGLPSSIEKTISKAKGQPREPQVYTLPPSQEEMTKNQVSLTXLVKGFYPSDIAVEWESNGQPENNYKTTPPVLDSDGSFFLYSRLTVDKSRWQEGNVFSXSVMHEALHNHYTQKSLSLSLGK

SEQ ID NO: 720 - protein, 452 aa, Artificial Sequence
  Synthesized sequence with two or more selenocysteine residues substituted for two or more cysteine residues
  VARIANT (1)...(452): Xaa = selenocysteine or cysteine
EVQLVESGGGLVQPGGSLRLSXAASGFTFSDYTMLWVRQAPGKGLEWVAIIKSGGSYSYYPDSVKGRFTISRDNAKNSLYLQMNSLRAEDTAVYYXARDGDYGSSYGAMDYWGQGTLVTVSSASTKGPSVFPLAPSSKSTSGGTAALGXLVKDYFPEPVTVSWNSGALTSGVHTFPAVLQSSGLYSLSSVVTVPSSSLGTQTYIXNVNHKPSNTKVDKKVEPKSXDKTHTXPPXPAPEAAGGPSVFLFPPKPKDTLMISRTPEVTXVVVDVSHEDPEVKFNWYVDGVEVHNAKTKPREEQYNSTYRVVSVLTVLHQDWLNGKEYKXKVSNKALPAPIEKTISKAKGQPREPQVYTLPPSRDELTKNQVSLTXLVKGFYPSDIAVEWESNGQPENNYKTTPPVLDSDGSFFLYSKLTVDKSRWQQGNVFSXSVMHEALHNHYTQKSLSLSPGK

SEQ ID NO: 721 - protein, 447 aa, Artificial Sequence
  Synthesized sequence with two or more selenocysteine residues substituted for two or more cysteine residues
  VARIANT (1)...(447): Xaa = selenocysteine or cysteine
QVQLVQSGSELKKPGASVKISXKASGYTFTNYGMNWVRQAPGQGLQWMGWINTDSGESTYAEEFKGRFVFSLDTSVNTAYLQITSLTAEDTGMYFXVRVGYDALDYWGQGTLVTVSSASTKGPSVFPLAPSSKSTSGGTAALGXLVKDYFPEPVTVSWNSGALTSGVHTFPAVLQSSGLYSLSSVVTVPSSSLGTQTYIXNVNHKPSNTKVDKRVEPKSXDKTHTXPPXPAPELLGGPSVFLFPPKPKDTLMISRTPEVTXVVVDVSHEDPEVKFNWYVDGVEVHNAKTKPREEQYNSTYRVVSVLTVLHQDWLNGKEYKXKVSNKALPAPIEKTISKAKGQPREPQVYTLPPSREEMTKNQVSLTXLVKGFYPSDIAVEWESNGQPENNYKTTPPVLDSDGSFFLYSKLTVDKSRWQQGNVFSXSVMHEALHNHYTQKSLSLSPGK

SEQ ID NO: 722 - protein, 450 aa, Artificial Sequence
  Synthesized sequence with two or more selenocysteine residues substituted for two or more cysteine residues
  VARIANT (1)...(450): Xaa = selenocysteine or cysteine
EVQLVESGGGLVQPGGSLRLSXAASGYEFSRSWMNWVRQAPGKGLEWVGRIYPGDGDTNYSGKFKGRFTISADTSKNTAYLQMNSLRAEDTAVYYXARDGSSWDWYFDVWGQGTLVTVSSASTKGPSVFPLAPSSKSTSGGTAALGXLVKDYFPEPVTVSWNSGALTSGVHTFPAVLQSSGLYSLSSVVTVPSSSLGTQTYIXNVNHKPSNTKVDKKVEPKSXDKTHTXPPXPAPELLGGPSVFLFPPKPKDTLMISRTPEVTXVVVDVSHEDPEVKFNWYVDGVEVHNAKTKPREEQYNSTYRVVSVLTVLHQDWLNGKEYKXKVSNKALPAPIEKTISKAKGQPREPQVYTLPPSREEMTKNQVSLTXLVKGFYPSDIAVEWESNGQPENNYKTTPPVLDSDGSFFLYSKLTVDKSRWQQGNVFSXSVMHEALHNHYTQKSLSLSPGK

SEQ ID NO: 723 - protein, 447 aa, Artificial Sequence
  Synthesized sequence with two or more selenocysteine residues substituted for two or more cysteine residues
  VARIANT (1)...(447): Xaa = selenocysteine or cysteine
EVQLVESGGGLVKPGGSLRLSXAASGFTFSAYAMNWVRQAPGKGLEWVGRIRTKNNNYATYYADSVKDRFTISRDDSKNTLYLQMNSLKTEDTAVYYXTTFYGNGVWGQGTLVTVSSASTKGPSVFPLAPSSKSTSGGTAALGXLVKDYFPEPVTVSWNSGALTSGVHTFPAVLQSSGLYSLSSVVTVPSSSLGTQTYIXNVNHKPSNTKVDKKVEPKSXDKTHTXPPXPAPELAGAPSVFLFPPKPKDTLMISRTPEVTXVVVDVSHEDPEVKFNWYVDGVEVHNAKTKPREEQYNSTYRVVSVLTVLHQDWLNGKEYKXKVSNKALPAPIEKTISKAKGQPREPQVYTLPPSRDELTKNQVSLTXLVKGFYPSDIAVEWESNGQPENNYKTTPPVLDSDGSFFLYSKLTVDKSRWQQGNVFSXSVMHEALHNHYTQKSLSLSPGK

SEQ ID NO: 724 - protein, 447 aa, Artificial Sequence
  Synthesized sequence with two or more selenocysteine residues substituted for two or more cysteine residues
  VARIANT (1)...(447): Xaa = selenocysteine or cysteine
EVQLVQSGAEVKKPGASVKVSXKASGYTFTDSYMSWVRQAPGQGLEWIGDMYPDNGDSSYNQKFRERVTITRDTSTSTAYLELSSLRSEDTAVYYXVLAPRWYFSVWGQGTLVTVSSASTKGPSVFPLAPSSKSTSGGTAALGXLVKDYFPEPVTVSWNSGALTSGVHTFPAVLQSSGLYSLSSVVTVPSSSLGTQTYIXNVNHKPSNTKVDKKVEPKSXDKTHTXPPXPAPELLGGPSVFLFPPKPKDTLMISRTPEVTXVVVDVSHEDPEVKFNWYVDGVEVHNAKTKPREEQYNSTYRVVSVLTVLHQDWLNGKEYKXKVSNKALPAPIEKTISKAKGQPREPQVYTLPPSREEMTKNQVSLTXLVKGFYPSDIAVEWESNGQPENNYKTTPPVLDSDGSFFLYSKLTVDKSRWQQGNVFSXSVMHEALHNHYTQKSLSLSPGK

SEQ ID NO: 725 - protein, 447 aa, Artificial Sequence
  Synthesized sequence with two or more selenocysteine residues substituted for two or more cysteine residues
  VARIANT (1)...(447): Xaa = selenocysteine or cysteine
EVQLVESGGGLVQPGGSLRLSXAASGYTFSSYWIEWVRQAPGKGLEWIGEILPGGGDTNYNEIFKGRATFSADTSKNTAYLQMNSLRAEDTAVYYXTRRVPIRLDYWGQGTLVTVSSASTKGPSVFPLAPSSKSTSGGTAALGXLVKDYFPEPVTVSWNSGALTSGVHTFPAVLQSSGLYSLSSVVTVPSSSLGTQTYIXNVNHKPSNTKVDKKVEPKSXDKTHTXPPXPAPELLGGPSVFLFPPKPKDTLMISRTPEVTXVVVDVSHEDPEVKFNWYVDGVEVHNAKTKPREEQYNSTYRVVSVLTVLHQDWLNGKEYKXKVSNKALPAPIEKTISKAKGQPREPQVYTLPPSREEMTKNQVSLTXLVKGFYPSDIAVEWESNGQPENNYKTTPPVLDSDGSFFLYSKLTVDKSRWQQGNVFSXSVMHEALHNHYTQKSLSLSPGK

SEQ ID NO: 726 - protein, 442 aa, Artificial Sequence
  Synthesized sequence with two or more selenocysteine residues substituted for two or more cysteine residues
  VARIANT (1)...(442): Xaa = selenocysteine or cysteine
QVQLVQSGAEVKKPGASVKVSXKASGYYTEAYYIHWVRQAPGQGLEWMGRIDPATGNTKYAPRLQDRVTMTRDTSTSTVYMELSSLRSEDTAVYYXASLYSLPVYWGQGTTVTVSSASTKGPSVFPLAPXSRSTSESTAALGXLVKDYFPEPVTVSWNSGALTSGVHTFPAVLQSSGLYSLSSVVTVPSSNFGTQTYTXNVDHKPSNTKVDKTVERKXXVEXPPXPAPPVAGPSVFLFPPKPKDTLMISRTPEVTXVVVDVSHEDPEVQFNWYVDGVEVHNAKTKPREEQFNSTFRVVSVLTVVHQDWLNGKEYKXKVSNKGLPSSIEKTISKTKGQPREPQVYTLPPSREEMTKNQVSLTXLVKGFYPSDIAVEWESNGQPENNYKTTPPMLDSDGSFFLYSKLTVDKSRWQQGNVFSXSVMHEALHNHYTQKSLSLSPGK

SEQ ID NO: 727 - protein, 447 aa, Artificial Sequence
  Synthesized sequence with two or more selenocysteine residues substituted for two or more cysteine residues
  VARIANT (1)...(447): Xaa = selenocysteine or cysteine
EVQLVESGGGLVQPGGSLRLSXAASGFTFSSYWMSWVRQAPGKGLEWVAYIKQDGNEKYYVDSVKGRFTISRDNAKNSLYLQMNSLRAEDTAVYYXAREGILWFGDLPTFWGQGTLVTVSSASTKGPSVFPLAPXSRSTSESTAALGXLVKDYFPEPVTVSWNSGALTSGVHTFPAVLQSSGLYSLSSVVTVPSSNFGTQTYTXNVDHKPSNTKVDKTVERKXXVEXPPXPAPPVAGPSVFLFPPKPKDTLMISRTPEVTXVVVDVSHEDPEVQFNWYVDGVEVHNAKTKPREEQFNSTFRVVSVLTVVHQDWLNGKEYKXKVSNKGLPAPIEKTISKTKGQPREPQVYTLPPSREEMTKNQVSLTXLVKGFYPSDIAVEWESNGQPENNYKTTPPMLDSDGSFFLYSKLTVDKSRWQQGNVFSXSVMHEALHNHYTQKSLSLSPGK

SEQ ID NO: 728 - protein, 454 aa, Artificial Sequence
  Synthesized sequence with two or more selenocysteine residues substituted for two or more cysteine residues
  VARIANT (1)...(454): Xaa = selenocysteine or cysteine
QVQLQESGAELVRSGASVRMSXKASGYTFTSYNMHWVKQTPGQGLEWIGYIYPGNGGTNYIQKFKGKAILTADTSSSTAYMQISSLTSEDSAVYFXTRSPSHYSSDPYFDYWGQGTTLTVSSEFASTKGPSVFPLAPSSKSTSGGTAALGXLVKDYFPEPVTVSWNSGALTSGVHTFPAVLQSSGLYSLSSVVTVPSSSLGTQTYIXNVNHKPSNTKVDKKVEPKSXDKTHTXPPXPAPELLGGPSVFLFPPKPKDTLMISRTPEVTXVVVDVSHEDPEVKFNWYVDGVEVHNAKTKPREEQYNSTYRVVSVLTVLHQDWLNGKEYKXKVSNKALPAPIEKTISKAKGQPREPQVYTLPPSRDELTKNQVSLTXLVKGFYPSDIAVEWESNGQPENNYKTTPPVLDSDGSFFLYSKLTVDKSRWQQGNVFSXSVMHEALHNHYTQKSLSLSPGK

SEQ ID NO: 729 - protein, 447 aa, Artificial Sequence
  Synthesized sequence with two or more selenocysteine residues substituted for two or more cysteine residues
  VARIANT (1)...(447): Xaa = selenocysteine or cysteine
EVQLVESGGGLVQPGGSLRLSXAASGFTFSDYGIAWVRQAPGKGLEWVAFISDLAYTIYYADTVTGRFTISRDNSKNTLYLQMNSLRAEDTAVYYXARDNWDAMDYWGQGTLVTVSSASTKGPSVFPLAPSSKSTSGGTAALGXLVKDYFPEPVTVSWNSGALTSGVHTFPAVLQSSGLYSLSSVVTVPSSSLGTQTYIXNVNHKPSNTKVDKKVEPKSXDKTHTXPPXPAPELLGGPSVFLFPPKPKDTLMISRTPEVTXVVVDVSHEDPEVKFNWYVDGVEVHNAKTKPREEQYNSTYRVVSVLTVLHQDWLNGKEYKXKVSNKALPAPIEKTISKAKGQPREPQVYTLPPSREEMTKNQVSLTXLVKGFYPSDIAVEWESNGQPENNYKTTPPVLDSDGSFFLYSKLTVDKSRWQQGNVFSXSVMHEALHNHYTQKSLSLSPGK

SEQ ID NO: 730 - protein, 445 aa, Artificial Sequence
  Synthesized sequence with two or more selenocysteine residues substituted for two or more cysteine residues
  VARIANT (1)...(445): Xaa = selenocysteine or cysteine
QVQLQQSGAELVKPGASVKLSXKASGYTFTSYDINWVRQRPEQGLEWIGWIFPGDGSTKYNEKFKGKATLTTDKSSSTAYMQLSRLTSEDSAVYFXAREDYYDNSYYFDYWGQGTTLTVSSAKTTPPSVYPLAPGSAAQTNSMVTLGXLVKGYFPEPVTVTWNSGSLSSGVHTFPAVLQSDLYTLSSSVTVPSSPRPSETVTXNVAHPASSTKVDKKIVPRDXGXKPXIXTVPEVSSVFIFPPKPKDVLTITLTPKVTXVVVDISKDDPEVQFSWFVDDVEVHTAQTQPREEQFNSTFRSVSELPIMHQDWLNGKEFKXRVNSAAFPAPIEKTISKTKGRPKAPQVYTIPPPKEQMAKDKVSLTXMITDFFPEDITVEWQWNGQPAENYKNTQPIMNTNGSYFVYSKLNVQKSNWEAGNTFTXSVLHEGLHNHHTEKSLSHSPGK

SEQ ID NO: 731 - protein, 456 aa, Artificial Sequence
  Synthesized sequence with two or more selenocysteine residues substituted for two or more cysteine residues
  VARIANT (1)...(456): Xaa = selenocysteine or cysteine
QVQLVQSGAEVKKPGSSVKVSXKASGGTFNRYTVNWVRQAPGQGLEWMGGIIPIFGTANYAQRFQGRLTITADESTSTAYMELSSLRSDDTAVYFXARENLDNSGTYYYFSGWFDPWGQGTLVTVSSASTKGPSVFPLAPSSKSTSGGTAALGXLVKDYFPEPVTVSWNSGALTSGVHTFPAVLQSSGLYSLSSVVTVPSSSLGTQTYIXNVNHKPSNTKVDKRVEPKSXDKTHTXPPXPAPELLGGPSVFLFPPKPKDTLMISRTPEVTXVVVDVSHEDPEVKFNWYVDGVEVHNAKTKPREEQYNSTYRVVSVLTVLHQDWLNGKEYKXKVSNKALPAPIEKTISKAKGQPREPQVYTLPPSREEMTKNQVSLTXLVKGFYPSDIAVEWESNGQPENNYKTTPPVLDSDGSFFLYSKLTVDKSRWQQGNVFSXSVMHEALHNHYTQKSLSLSPG

SEQ ID NO: 732 - protein, 444 aa, Artificial Sequence
  Synthesized sequence with two or more selenocysteine residues substituted for two or more cysteine residues
  VARIANT (1)...(444): Xaa = selenocysteine or cysteine
QVQLVQSGAEVKKPGASVKVSXKASGYTFTSYYMHWVRQAPGQGLEWMGEIHPSGGRTNYNEKFKSRVTMTRDTSTSTVYMELSSLRSEDTAVYYXARERPLYASDLWGQGTTVTVSSASTKGPSVFPLAPXSRSTSESTAALGXLVKDYFPEPVTVSWNSGALTSGVHTFPAVLQSSGLYSLSSVVTVPSSNFGTQTYTXNVDHKPSNTKVDKTVERKXXVEXPPXPAPPVAGPSVFLFPPKPKDTLMISRTPEVTXVVVDVSHEDPEVQFNWYVDGVEVHNAKTKPREEQFNSTFRVVSVLTVVHQDWLNGKEYKXKVSNKGLPSSIEKTISKTKGQPREPQVYTLPPSREEMTKNQVSLTXLVKGFYPSDIAVEWESNGQPENNYKTTPPMLDSDGSFFLYSKLTVDKSRWQQGNVFSXSVMHEALHNHYTQKSLSLSPGK

SEQ ID NO: 733 - protein, 446 aa, Artificial Sequence
  Synthesized sequence with two or more selenocysteine residues substituted for two or more cysteine residues
  VARIANT (1)...(446): Xaa = selenocysteine or cysteine
EVQLVQSGGGLVKPGGSLRLSXAASGFTFSSYSMNWVRQAPGKGLEWVSSISSSSSYIYYADSVKGRFTISRDNAKNSLYLQMNSLRAEDTAVYYXARVTDAFDIWGQGTMVTVSSASTKGPSVFPLAPSSKSTSGGTAALGXLVKDYFPEPVTVSWNSGALTSGVHTFPAVLQSSGLYSLSSVVTVPSSSLGTQTYIXNVNHKPSNTKVDKKVEPKSXDKTHTXPPXPAPELLGGPSVFLFPPKPKDTLMISRTPEVTXVVVDVSHEDPEVKFNWYVDGVEVHNAKTKPREEQYNSTYRVVSVLTVLHQDWLNGKEYKXKVSNKALPAPIEKTISKAKGQPREPQVYTLPPSREEMTKNQVSLTXLVKGFYPSDIAVEWESNGQPENNYKTTPPVLDSDGSFFLYSKLTVDKSRWQQGNVFSXSVMHEALHNHYTQKSLSLSPGK

SEQ ID NO: 734 - protein, 456 aa, Artificial Sequence
  Synthesized sequence with two or more selenocysteine residues substituted for two or more cysteine residues
  VARIANT (1)...(456): Xaa = selenocysteine or cysteine
QVQLVQSGSELKKPGASVKVSXKASGYTFTNYGMNWVRQAPGQGLEWMGWINTYTGEPTYADDFTGRFVFSLDTSVSTAYLQISSLKAEDTAVYYXARNPINYYGINYEGYVMDYWGQGTLVTVSSASTKGPSVFPLAPSSKSTSGGTAALGXLVKDYFPEPVTVSWNSGALTSGVHTFPAVLQSSGLYSLSSVVTVPSSSLGTQTYIXNVNHKPSNTKVDKKVEPKSXDKTHTXPPXPAPELAGAPSVFLFPPKPKDTLMISRTPEVTXVVVDVSHEDPEVKFNWYVDGVEVHNAKTKPREEQYNSTYRVVSVLTVLHQDWLNGKEYKXKVSNKALPAPIEKTISKAKGQPREPQVYTLPPSRDELTKNQVSLTXLVKGFYPSDIAVEWESNGQPENNYKTTPPVLDSDGSFFLYSKLTVDKSRWQQGNVFSXSVMHEALHNHYTQKSLSLSPGK

SEQ ID NO: 735 - protein, 587 aa, Artificial Sequence
  Synthesized sequence with two or more selenocysteine residues substituted for two or more cysteine residues
  VARIANT (1)...(587): Xaa = selenocysteine or cysteine
EVQLVESGGGLVQPGRSLRLSXAASGFTFDDYAMHWVRQAPGKGLEWVSAITWNSGHIDYADSVEGRFTISRDNAKNSLYLQMNSLRAEDTAVYYXAKVSYLSTASSLDYWGQGTLVTVSSGGGGSGGGGSEVQLVQSGAEVKKPGSSVKVSXKASGGSFGGYGIGWVRQAPGQGLEWMGGITPFFGFADYAQKFQGRVTITADESTTTAYMELSGLTSDDTAVYYXARDPNEFWNGYYSTHDFDSWGQGTTVTVSSASTKGPSVFPLAPSSKSTSGGTAALGXLVKDYFPEPVTVSWNSGALTSGVHTFPAVLQSSGLYSLSSVVTVPSSSLGTQTYIXNVNHKPSNTKVDKKVEPKSXDKTHTXPPXPAPELLGGPSVFLFPPKPKDTLMISRTPEVTXVVVDVSHEDPEVKFNWYVDGVEVHNAKTKPREEQYNSTYRVVSVLTVLHQDWLNGKEYKXKVSNKALPAPIEKTISKAKGQPREPQVYTLPPSRDELTKNQVSLTXLVKGFYPSDIAVEWESNGQPENNYKTTPPVLDSDGSFFLYSKLTVDKSRWQQGNVFSXSVMHEALHNHYTQKSLSLSPGK

SEQ ID NO: 736 - protein, 446 aa, Artificial Sequence
  Synthesized sequence with two or more selenocysteine residues substituted for two or more cysteine residues
  VARIANT (1)...(446): Xaa = selenocysteine or cysteine
QVQLQESGPGLVKPSETLSLTXTVSGGSISIYYWSWIRQPPGKGLEWIGYVYYSGSTNYNPSLKSRVTISVDTSKNQFSLKLNSVTAADTAVYYXARGGYDFWSGYFDYWGQGTLVTVSSASTKGPSVFPLAPXSRSTSESTAALGXLVKDYFPEPVTVSWNSGALTSGVHTFPAVLQSSGLYSLSSVVTVPSSNFGTQTYTXNVDHKPSNTKVDKTVERKXXVEXPPXPAPPVAGPSVFLFPPKPKDTLMISRTPEVTXVVVDVSHEDPEVQFNWYVDGVEVHNAKTKPREEQFNSTFRVVSVLTVVHQDWLNGKEYKXKVSNKGLPAPIEKTISKTKGQPREPQVYTLPPSREEMTKNQVSLTXLVKGFYPSDIAVEWESNGQPENNYKTTPPMLDSDGSFFLYSKLTVDKSRWQQGNVFSXSVMHEALHNHYTQKSLSLSPGK

SEQ ID NO: 737 - protein, 449 aa, Artificial Sequence
  Synthesized sequence with two or more selenocysteine residues substituted for two or more cysteine residues
  VARIANT (1)...(449): Xaa = selenocysteine or cysteine
QLQLQESGPGLVKPSETLSLTXTVSGGSITSSSYYWGWIRQPPGKGLEWIGSIYYRGSTNYNPSLKSRVTISVDSSKNQFYLKVSSVTAVDTAVYYXARQNGAARPSWFDPWGQGTLVTVSSASTKGPSVFPLAPXSRSTSESTAALGXLVKDYFPEPVTVSWNSGALTSGVHTFPAVLQSSGLYSLSSVVTVPSSSLGTKTYTXNVDHKPSNTKVDKRVESKYGPPXPPXPAPEFLGGPSVFLFPPKPKDTLMISRTPEVTXVVVDVSQEDPEVQFNWYVDGVEVHNAKTKPREEQFNSTYRVVSVLTVLHQDWLNGKEYKXKVSNKGLPSSIEKTISKAKGQPREPQVYTLPPSQEEMTKNQVSLTXLVKGFYPSDIAVEWESNGQPENNYKTTPPVLDSDGSFFLYSRLTVDKSRWQEGNVFSXSVMHEALHNHYTQKSLSLSLGK

SEQ ID NO: 738 - protein, 449 aa, Artificial Sequence
  Synthesized sequence with two or more selenocysteine residues substituted for two or more cysteine residues
  VARIANT (1)...(449): Xaa = selenocysteine or cysteine
QVQLVQSGAEVKKPGSSVKVSXKASGYTFTDQTIHWMRQAPGQGLEWIGYIYPRDDSPKYNENFKGKVTITADKSTSTAYMELSSLRSEDTAVYYXAIPDRSGYAWFIYWGQGTLVTVSSASTKGPSVFPLAPSSKSTSGGTAALGXLVKDYFPEPVTVSWNSGALTSGVHTFPAVLQSSGLYSLSSVVTVPSSSLGTQTYIXNVNHKPSNTKVDKRVEPKSXDKTHTXPPXPAPEAAGGPSVFLFPPKPKDTLMISRTPEVTXVVVDVSHEDPEVKFNWYVDGVEVHNAKTKPREEQYNSTYRVVSVLTVLHQDWLNGKEYKXKVSNKALPAPIEKTISKAKGQPREPQVYTLPPSREEMTKNQVSLTXLVKGFYPSDIAVEWESNGQPENNYKTTPPVLDSDGSFFLYSKLTVDKSRWQQGNVFSXSVMHEALHNHYTQKSLSLSPG

SEQ ID NO: 739 - protein, 224 aa, Artificial Sequence
  Synthesized sequence with two or more selenocysteine residues substituted for two or more cysteine residues
  VARIANT (1)...(224): Xaa = selenocysteine or cysteine
QVQLQQPGAELVKPGASVKMSXKASGYTFTSYNMHWVKQTPGRGLEWIGAIYPGNGDTSYNQKFKGKATLTADKSSSTAYMQLSSLTSEDSAVYYXARSTYYGGDWYFNVWGAGTTVTVSAASTKGPSVFPLAPSSKSTSGGTAALGXLVKDYFPEPVTVSWNSGALTSGVHTFPAVLQSSGLYSLSSVVTVPSSSLGTQTYIXNVNHKPSNTKVDKKVEPKSX

SEQ ID NO: 740 - protein, 448 aa, Artificial Sequence
  Synthesized sequence with two or more selenocysteine residues substituted for two or more cysteine residues
  VARIANT (1)...(448): Xaa = selenocysteine or cysteine
EVQLVQSGGGLVKPGGSLRLSXAASGFTFSSFAMHWVRQAPGKGLEWISVIDTRGATYYADSVKGRFTISRDNAKNSLYLQMNSLRAEDTAVYYXARLGNFYYGMDVWGQGTTVTVSSASTKGPSVFPLAPSSKSTSGGTAALGXLVKDYFPEPVTVSWNSGALTSGVHTFPAVLQSSGLYSLSSVVTVPSSSLGTQTYIXNVNHKPSNTKVDKKVEPKSXDKTHTXPPXPAPELLGGPSVFLFPPKPKDTLMISRTPEVTXVVVDVSHEDPEVKFNWYVDGVEVHNAKTKPREEQYNSTYRVVSVLTVLHQDWLNGKEYKXKVSNKALPAPIEKTISKAKGQPREPQVYTLPPSRDELTKNQVSLTXLVKGFYPSDIAVEWESNGQPENNYKTTPPVLDSDGSFFLYSKLTVDKSRWQQGNVFSXSVMHEALHNHYTQKSLSLSPGK

SEQ ID NO: 741 - protein, 456 aa, Artificial Sequence; identical to SEQ ID NO: 502
  Synthesized sequence with two or more selenocysteine residues substituted for two or more cysteine residues
  VARIANT (1)...(456): Xaa = selenocysteine or cysteine

SEQ ID NO: 742 - protein, 449 aa, Artificial Sequence
  Synthesized sequence with two or more selenocysteine residues substituted for two or more cysteine residues
  VARIANT (1)...(449): Xaa = selenocysteine or cysteine
EVQLVQSGAEVKKPGASVKVSXKASGYTFTDYNMHWVRQAPGQGLEWMGEINPNSGGAGYNQKFKGRVTMTTDTSTSTAYMELRSLRSDDTAVYYXARLGYDDIYDDWYFDVWGQGTTVTVSSASTKGPSVFPLAPXSRSTSESTAALGXLVKDYFPEPVTVSWNSGALTSGVHTFPAVLQSSGLYSLSSVVTVPSSNFGTQTYTXNVDHKPSNTKVDKTVERKXXVEXPPXPAPPVAGPSVFLFPPKPKDTLMISRTPEVTXVVVDVSHEDPEVQFNWYVDGVEVHNAKTKPREEQFNSTFRVVSVLTVVHQDWLNGKEYKXKVSNKGLPAPIEKTISKTKGQPREPQVYTLPPSREEMTKNQVSLTXLVKGFYPSDIAVEWESNGQPENNYKTTPPMLDSDGSFFLYSKLTVDKSRWQQGNVFSXSVMHEALHNHYTQKSLSLSPGK

SEQ ID NO: 743 - protein, 447 aa, Artificial Sequence
  Synthesized sequence with two or more selenocysteine residues substituted for two or more cysteine residues
  VARIANT (1)...(447): Xaa = selenocysteine or cysteine
EVQLVESGGGLVQPGGSLRLSXATSGYTFTEYIIHWVRQAPGKGLEWVASINPDYDITNYNQRFKGRFTISLDKSKRTAYLQMNSLRAEDTAVYYXASWISDFFDYWGQGTLVTVSSASTKGPSVFPLAPSSKSTSGGTAALGXLVKDYFPEPVTVSWNSGALTSGVHTFPAVLQSSGLYSLSSVVTVPSSSLGTQTYIXNVNHKPSNTKVDKKVEPKSXDKTHTXPPXPAPELLGGPSVFLFPPKPKDTLMISRTPEVTXVVVDVSHEDPEVKFNWYVDGVEVHNAKTKPREEQYNSTYRVVSVLTVLHQDWLNGKEYKXKVSNKALPAPIEKTISKAKGQPREPQVYTLPPSREEMTKNQVSLTXLVKGFYPSDIAVEWESNGQPENNYKTTPPVLDSDGSFFLYSKLTVDKSRWQQGNVFSXSVMHEALHNHYTQKSLSLSPGK

SEQ ID NO: 744 - protein, 447 aa, Artificial Sequence
  Synthesized sequence with two or more selenocysteine residues substituted for two or more cysteine residues
  VARIANT (1)...(447): Xaa = selenocysteine or cysteine
QVQLVQSGAEVKKPGASVKVSXKASGYTFTDYSIHWVRQAPGQGLEWIGYIYPSNGDSGYNQKFKNRVTMTRDTSTSTAYMELSRLRSEDTAVYYXATYFANNFDYWGQGTTLTVSSASTKGPSVFPLAPSSKSTSGGTAALGXLVKDYFPEPVTVSWNSGALTSGVHTFPAVLQSSGLYSLSSVVTVPSSSLGTQTYIXNVNHKPSNTKVDKRVEPKSXDKTHTXPPXPAPELLGGPSVFLFPPKPKDTLMISRTPEVTXVVVDVSHEDPEVKFNWYVDGVEVHNAKTKPREEQYNSTYRVVSVLTVLHQDWLNGKEYKXKVSNKALPAPIEKTISKAKGQPREPQVYTLPPSREEMTKNQVSLTXLVKGFYPSDIAVEWESNGQPENNYKTTPPVLDSDGSFFLYSKLTVDKSRWQQGNVFSXSVMHEALHNHYTQKSLSLSPGK

SEQ ID NO: 745 - protein, 447 aa, Artificial Sequence
  Synthesized sequence with two or more selenocysteine residues substituted for two or more cysteine residues
  VARIANT (1)...(447): Xaa = selenocysteine or cysteine
QVQLVQSGAEVKKPGASVKVSXKASGYTFTNYGMNWVRQAPGQGLEWMGWINTYTGEPTYADDFKGRVTMTTDTSTSTAYMELRSLRSDDTAVYYXARIGDSSPSDYWGQGTLVTVSSASTKGPSVFPLAPSSKSTSGGTAALGXLVKDYFPEPVTVSWNSGALTSGVHTFPAVLQSSGLYSLSSVVTVPSSSLGTQTYIXNVNHKPSNTKVDKKVEPKSXDKTHTXPPXPAPELLGGPSVFLFPPKPKDTLMISRTPEVTXVVVDVSHEDPEVKFNWYVDGVEVHNAKTKPREEQYNSTYRVVSVLTVLHQDWLNGKEYKXKVSNKALPAPIEKTISKAKGQPREPQVYTLPPSRDELTKNQVSLTXLVKGFYPSDIAVEWESNGQPENNYKTTPPVLDSDGSFFLYSKLTVDKSRWQQGNVFSXSVMHEALHNHYTQKSLSLSPG

SEQ ID NO: 746 - protein, 444 aa, Artificial Sequence
  Synthesized sequence with two or more selenocysteine residues substituted for two or more cysteine residues
  VARIANT (1)...(444): Xaa = selenocysteine or cysteine
EVPLVESGGGLVQPGGSLRLSXAVSGFTFSNYGMVWVRQAPGKGLEWVAYIDSDGDNTYYRDSVKGRFTISRDNAKSSLYLQMNSLRAEDTAVYYXTTGIVRPFLYWGQGTLVTVSSASTKGPSVFPLAPXSRSTSESTAALGXLVKDYFPEPVTVSWNSGALTSGVHTFPAVLQSSGLYSLSSVVTVPSSSLGTKTYTXNVDHKPSNTKVDKRVESKYGPPXPPXPAPEFLGGPSVFLFPPKPKDTLMISRTPEVTXVVVDVSQEDPEVQFNWYVDGVEVHNAKTKPREEQFNSTYRVVSVLTVLHQDWLNGKEYKXKVSNKGLPSSIEKTISKAKGQPREPQVYTLPPSQEEMTKNQVSLTXLVKGFYPSDIAVEWESNGQPENNYKTTPPVLDSDGSFFLYSRLTVDKSRWQEGNVFSXSVMHEALHNHYTQKSLSLSLGK

SEQ ID NO: 747 - protein, 469 aa, Artificial Sequence
  Synthesized sequence with two or more selenocysteine residues substituted for two or more cysteine residues
  VARIANT (1)...(469): Xaa = selenocysteine or cysteine
MGWSXIILFLVATATGVHSVQLQQSGSELKKPGASVKVSXKASGYTFTNYGMNWVKQAPGQGLKWMGWINTYTGEPTYTDDFKGRFAFSLDTSVSTAYLQISSLKADDTAVYFXARGGFGSSYWYFDVWGQGSLVTVSSASTKGPSVFPLAPSSKSTSGGTAALGXLVKDYFPEPVTVSWNSGALTSGVHTFPAVLQSSGLYSLSSVVTVPSSSLGTQTYIXNVNHKPSNTKVDKRVEPKSXDKTHTXPPXPAPELLGGPSVFLFPPKPKDTLMISRTPEVTXVVVDVSHEDPEVKFNWYVDGVEVHNAKTKPREEQYNSTYRVVSVLTVLHQDWLNGKEYKXKVSNKALPAPIEKTISKAKGQPREPQVYTLPPSREEMTKNQVSLTXLVKGFYPSDIAVEWESNGQPENNYKTTPPVLDSDGSFFLYSKLTVDKSRWQQGNVFSXSVMHEALHNHYTQKSLSLSPGK

SEQ ID NO: 748 - protein, 442 aa, Artificial Sequence
  Synthesized sequence with two or more selenocysteine residues substituted for two or more cysteine residues
  VARIANT (1)...(442): Xaa = selenocysteine or cysteine
QVQLQQSGSELKKPGASVKISXKASGYSFTDYIILWVRQNPGKGLEWIGHIDPYYGSSNYNLKFKGRVTITADQSTTTAYMELSSLRSEDTAVYYXGRSKRDYFDYWGQGTTLTVSSASTKGPSVFPLAPXSRSTSESTAALGXLVKDYFPEPVTVSWNSGALTSGVHTFPAVLQSSGLYSLSSVVTVPSSNFGTQTYTXNVDHKPSNTKVDKTVERKXXVEXPPXPAPPVAGPSVFLFPPKPKDTLMISRTPEVTXVVVDVSQEDPEVQFNWYVDGVEVHNAKTKPREEQFNSTYRVVSVLTVLHQDWLNGKEYKXKVSNKGLPSSIEKTISKAKGQPREPQVYTLPPSQEEMTKNQVSLTXLVKGFYPSDIAVEWESNGQPENNYKTTPPVLDSDGSFFLYSRLTVDKSRWQEGNVFSXSVMHEALHNHYTQKSLSLSLG

SEQ ID NO: 749 - protein, 443 aa, Artificial Sequence
  Synthesized sequence with two or more selenocysteine residues substituted for two or more cysteine residues
  VARIANT (1)...(443): Xaa = selenocysteine or cysteine
QVQLQESGPGLVKPSETLSLTXAVSGHSISHDHAWSWVRQPPGEGLEWIGFISYSGITNYNPSLQGRVTISRDNSKNTLYLQMNSLRAEDTAVYYXARSLARTTAMDYWGEGTLVTVSSASTKGPSVFPLAPSSKSTSGGTAALGXLVKDYFPEPVTVSWNSGALTSGVHTFPAVLQSSGLYSLSSVVTVPSSNFGTQTYTXNVDHKPSNTKVDKTVERKSXVEXPPXPAPPVAGPSVFLFPPKPKDTLMISRTPEVTXVVVDVSQEDPEVQFNWYVDGVEVHNAKTKPREEQFNSTFRVVSVLTVVHQDWLNGKEYKXKVSNKGLPAPIEKTISKTKGQPREPQVYTLPPSQEEMTKNQVSLTXLVKGFYPSDIAVEWESNGQPENNYKTTPPMLDSDGSFFLYSKLTVDKSRWQEGNVFSXSVMHEALHAHYTQKSLSLSP

SEQ ID NO: 750 - protein, 446 aa, Artificial Sequence
  Synthesized sequence with two or more selenocysteine residues substituted for two or more cysteine residues
  VARIANT (1)...(446): Xaa = selenocysteine or cysteine
EVQLVESGGGLVQPGRSLRLSXAASRFTFDDYAMHWVRQAPGKGLEWVSGISWNSGRIGYADSVKGRFTISRDNAENSLFLQMNGLRAEDTALYYXAKGRDSFDIWGQGTMVTVSSASTKGPSVFPLAPSSKSTSGGTAALGXLVKDYFPEPVTVSWNSGALTSGVHTFPAVLQSSGLYSLSSVVTVPSSSLGTQTYIXNVNHKPSNTKVDKKVEPKSXDKTHTXPPXPAPELLGGPSVFLFPPKPKDTLMISRTPEVTXVVVDVSHEDPEVKFNWYVDGVEVHNAKTKPREEQYNSTYRVVSVLTVLHQDWLNGKEYKXKVSNKALPAPIEKTISKAKGQPREPQVYTLPPSRDELTKNQVSLTXLVKGFYPSDIAVEWESNGQPENNYKTTPPVLDSDGSFFLYSKLTVDKSRWQQGNVFSXSVMHEALHNHYTQKSLSLSPGK

SEQ ID NO: 751 - protein, 457 aa, Artificial Sequence
  Synthesized sequence with two or more selenocysteine residues substituted for two or more cysteine residues
  VARIANT (1)...(457): Xaa = selenocysteine or cysteine
EVQLVESGGGLVQPGGSLRLSXAASGFTFSNYWMNWVRQAPGKGLEWVAAINQDGSEKYYVGSVKGRFTISRDNAKNSLYLQMNSLRVEDTAVYYXVRDYYDILTDYYIHYWYFDLWGRGTLVTVSSASTKGPSVFPLAPSSKSTSGGTAALGXLVKDYFPEPVTVSWNSGALTSGVHTFPAVLQSSGLYSLSSVVTVPSSSLGTQTYIXNVNHKPSNTKVDKRVEPKSXDKTHTXPPXPAPELLGGPSVFLFPPKPKDTLMISRTPEVTXVVVDVSHEDPEVKFNWYVDGVEVHNAKTKPREEQYNSTYRVVSVLTVLHQDWLNGKEYKXKVSNKALPAPIEKTISKAKGQPREPQVYTLPPSREEMTKNQVSLTXLVKGFYPSDIAVEWESNGQPENNYKTTPPVLDSDGSFFLYSKLTVDKSRWQQGNVFSXSVMHEALHNHYTQKSLSLSPGK

SEQ ID NO: 752 - protein, 445 aa, Artificial Sequence
  Synthesized sequence with two or more selenocysteine residues substituted for two or more cysteine residues
  VARIANT (1)...(445): Xaa = selenocysteine or cysteine
EVQLLESGGGLVQPGGSLRLSXAASGFTFSHYVMAWVRQAPGKGLEWVSSISSSGGWTLYADSVKGRFTISRDNSKNTLYLQMNSLRAEDTAVYYXTRGLKMATIFDYWGQGTLVTVSSASTKGPSVFPLAPXSRSTSESTAALGXLVKDYFPEPVTVSWNSGALTSGVHTFPAVLQSSGLYSLSSVVTVPSSNFGTQTYTXNVDHKPSNTKVDKTVERKXXVEXPPXPAPPVAGPSVFLFPPKPKDTLMISRTPEVTXVVVDVSHEDPEVQFNWYVDGVEVHNAKTKPREEQFNSTFRVVSVLTVVHQDWLNGKEYKXKVSNKGLPAPIEKTISKTKGQPREPQVYTLPPSREEMTKNQVSLTXLVKGFYPSDIAVEWESNGQPENNYKTTPPMLDSDGSFFLYSKLTVDKSRWQQGNVFSXSVMHEALHNHYTQKSLSLSPGK

SEQ ID NO: 753 - protein, 451 aa, Artificial Sequence
  Synthesized sequence with two or more selenocysteine residues substituted for two or more cysteine residues
  VARIANT (1)...(451): Xaa = selenocysteine or cysteine
EVQLQQPGPELEKPGASVKLSXKASGYSFTDYNMNWVKQNNGESLEWIGKIDPYYGGPSYNQKFKDKATLTVDKSSSTAYMQLKSLTSEDSAVYYXTRGGNRDWYFDVWGAGTTLTVSAEFASTKGPSVFPLAPSSKSTSGGTAALGXLVKDYFPEPVTVSWNSGALTSGVHTFPAVLQSSGLYSLSSVVTVPSSSLGTQTYIXNVNHKPSNTKVDKKVEPKSXDKTHTXPPXPAPELLGGPSVFLFPPKPKDTLMISRTPEVTXVVVDVSHEDPEVKFNWYVDGVEVHNAKTKPREEQYNSTYRVVSVLTVLHQDWLNGKEYKXKVSNKALPAPIEKTISKAKGQPREPQVYTLPPSRDELTKNQVSLTXLVKGFYPSDIAVEWESNGQPENNYKTTPPVLDSDGSFFLYSKLTVDKSRWQQGNVFSXSVMHEALHNHYTQKSLSLSPGK

SEQ ID NO: 754 - protein, 446 aa, Artificial Sequence
  Synthesized sequence with two or more selenocysteine residues substituted for two or more cysteine residues
  VARIANT (1)...(446): Xaa = selenocysteine or cysteine
QVQLVQSGAEVKKPGASVKVSXKASGYTFTSYSISWVRQAPGQGLEWMGWISVYNGNTNYAQKFQGRVTMTTDTSTSTAYLELRSLRSDDTAVYYXARDPIAAGYWGQGTLVTVSSASTKGPSVFPLAPSSKSTSGGTAALGXLVKDYFPEPVTVSWNSGALTSGVHTFPAVLQSSGLYSLSSVVTVPSSSLGTQTYIXNVNHKPSNTKVDKKVEPKSXDKTHTXPPXPAPELLGGPSVFLFPPKPKDTLMISRTPEVTXVVVDVSHEDPEVKFNWYVDGVEVHNAKTKPREEQYNSTYRVVSVLTVLHQDWLNGKEYKXKVSNKALPAPIEKTISKAKGQPREPQVYTLPPSREEMTKNQVSLTXLVKGFYPSDIAVEWESNGQPENNYKTTPPVLDSDGSFFLYSKLTVDKSRWQQGNVFSXSVMHEALHNHYTQKSLSLSPGK

SEQ ID NO: 755 - protein, 449 aa, Artificial Sequence
  Synthesized sequence with two or more selenocysteine residues substituted for two or more cysteine residues
  VARIANT (1)...(449): Xaa = selenocysteine or cysteine
EVQLVESGGKLLKPGGSLKLSXAASGFTFSSFAMSWFRQSPEKRLEWVAEISSGGSYTYYPDTVTGRFTISRDNAKNTLYLEMSSLRSEDTAMYYXARGLWGYYALDYWGQGTSVTVSSASTKGPSVFPLAPSSKSTSGGTAALGXLVKDYFPEPVTVSWNSGALTSGVHTFPAVLQSSGLYSLSSVVTVPSSSLGTQTYIXNVNHKPSNTKVDKKVEPKSXDKTHTXPPXPAPELLGGPSVFLFPPKPKDTLMISRTPEVTXVVVDVSHEDPEVKFNWYVDGVEVHNAKTKPREEQYNSTYRVVSVLTVLHQDWLNGKEYKXKVSNKALPAPIEKTISKAKGQPREPQVYTLPPSRDELTKNQVSLTXLVKGFYPSDIAVEWESNGQPENNYKTTPPVLDSDGSFFLYSKLTVDKSRWQQGNVFSXSVMHEALHNHYTQKSLSLSPGK

SEQ ID NO: 756 - protein, 443 aa, Artificial Sequence
  Synthesized sequence with two or more selenocysteine residues substituted for two or more cysteine residues
  VARIANT (1)...(443): Xaa = selenocysteine or cysteine
QVQLVQSGAEVKKPGASVKVSXKASGYAFTYYLIEWVRQAPGQGLEWIGVINPGSGGTNYNEKFKGRATITADKSTSTAYMELSSLRSEDTAVYFXARNWMNFDYWGQGTTVTVSSASTKGPSVFPLAPXSRSTSESTAALGXLVKDYFPEPVTVSWNSGALTSGVHTFPAVLQSSGLYSLSSVVTVPSSSLGTKTYTXNVDHKPSNTKVDKRVESKYGPPXPPXPAPEFLGGPSVFLFPPKPKDTLMISRTPEVTXVVVDVSQEDPEVQFNWYVDGVEVHNAKTKPREEQFNSTYRVVSVLTVLHQDWLNGKEYKXKVSNKGLPSSIEKTISKAKGQPREPQVYTLPPSQEEMTKNQVSLTXLVKGFYPSDIAVEWESNGQPENNYKTTPPVLDSDGSFFLYSRLTVDKSRWQEGNVFSXSVMHEALHNHYTQKSLSLSLGK

SEQ ID NO: 757 - protein, 449 aa, Artificial Sequence
  Synthesized sequence with two or more selenocysteine residues substituted for two or more cysteine residues
  VARIANT (1)...(449): Xaa = selenocysteine or cysteine
EVQLVESGGGLVQPGGSLRLSXAASGFTFSPFAMSWVRQAPGKGLEWVAKISPGGSWTYYSDTVTGRFTISRDNAKNSLYLQMNSLRAEDTAVYYXARQLWGYYALDIWGQGTTVTVSSASTKGPSVFPLAPSSKSTSGGTAALGXLVKDYFPEPVTVSWNSGALTSGVHTFPAVLQSSGLYSLSSVVTVPSSSLGTQTYIXNVNHKPSNTKVDKKVEPKSXDKTHTXPPXPAPELLGGPSVFLFPPKPKDTLMISRTPEVTXVVVDVSHEDPEVKFNWYVDGVEVHNAKTKPREEQYNSTYRVVSVLTVLHQDWLNGKEYKXKVSNKALPAPIEKTISKAKGQPREPQVYTLPPSRDELTKNQVSLTXLVKGFYPSDIAVEWESNGQPENNYKTTPPVLDSDGSFFLYSKLTVDKSRWQQGNVFSXSVMHEALHNHYTQKSLSLSPGK

SEQ ID NO: 758 - protein, 446 aa, Artificial Sequence
  Synthesized sequence with two or more selenocysteine residues substituted for two or more cysteine residues
  VARIANT (1)...(446): Xaa = selenocysteine or cysteine
EVQLVESGGGLVQPGGSLRLSXAASGYSITNDYAWNWVRQAPGKGLEWVGYISYSGYTTYNPSLKSRFTISRDTSKNTLYLQMNSLRAEDTAVYYXARWTSGLDYWGQGTLVTVSSASTKGPSVFPLAPSSKSTSGGTAALGXLVKDYFPEPVTVSWNSGALTSGVHTFPAVLQSSGLYSLSSVVTVPSSSLGTQTYIXNVNHKPSNTKVDKKVEPKSXDKTHTXPPXPAPELLGGPSVFLFPPKPKDTLMISRTPEVTXVVVDVSHEDPEVKFNWYVDGVEVHNAKTKPREEQYNSTYRVVSVLTVLHQDWLNGKEYKXKVSNKALPAPIEKTISKAKGQPREPQVYTLPPSREEMTKNQVSLTXLVKGFYPSDIAVEWESNGQPENNYKTTPPVLDSDGSFFLYSKLTVDKSRWQQGNVFSXSVMHEALHNHYTQKSLSLSPGK

SEQ ID NO: 759 - protein, 441 aa, Artificial Sequence
  Synthesized sequence with two or more selenocysteine residues substituted for two or more cysteine residues
  VARIANT (1)...(441): Xaa = selenocysteine or cysteine
EVQLVESGGGLVQPGGSLRLSXAASGFTFSRYSMSWVRQAPGKGLELVAQINSVGNSTYYPDTVKGRFTISRDNAKNTLYLQMNSLRAEDTAVYYXASGDYWGQGTLVTVSSASTKGPSVFPLAPSSKSTSGGTAALGXLVKDYFPEPVTVSWNSGALTSGVHTFPAVLQSSGLYSLSSVVTVPSSSLGTQTYIXNVNHKPSNTKVDKKVEPKSXDKTHTXPPXPAPELLGGPSVFLFPPKPKDTLMISRTPEVTXVVVDVSHEDPEVKFNWYVDGVEVHNAKTKPREEQYNSTYRVVSVLTVLHQDWLNGKEYKXKVSNKALPAPIEKTISKAKGQPREPQVYTLPPSRDELTKNQVSLTXLVKGFYPSDIAVEWESNGQPENNYKTTPPVLDSDGSFFLYSKLTVDKSRWQQGNVFSXSVMHEALHNHYTQKSLSLSPG

SEQ ID NO: 760 - protein, 448 aa, Artificial Sequence
  Synthesized sequence with two or more selenocysteine residues substituted for two or more cysteine residues
  VARIANT (1)...(448): Xaa = selenocysteine or cysteine
QVQLVQSGAEVKKPGASVKVSXKASGYTFTNSWIGWFRQAPGQGLEWIGDIYPGGGYTNYNEIFKGKATMTADTSTNTAYMELSSLRSEDTAVYYXSRGIPGYAMDYWGQGTLVTVSSASTKGPSVFPLAPSSKSTSGGTAALGXLVKDYFPEPVTVSWNSGALTSGVHTFPAVLQSSGLYSLSSVVTVPSSSLGTQTYIXNVNHKPSNTKVDKKVEPKSXDKTHTXPPXPAPELLGGPSVFLFPPKPKDTLMISRTPEVTXVVVDVSHEDPEVKFNWYVDGVEVHNAKTKPREEQYNSTYRVVSVLTVLHQDWLNGKEYKXKVSNKALPAPIEKTISKAKGQPREPQVYTLPPSRDELTKNQVSLTXLVKGFYPSDIAVEWESNGQPENNYKTTPPVLDSDGSFFLYSKLTVDKSRWQQGNVFSXSVMHEALHNHYTQKSLSLSPGK

SEQ ID NO: 761 - protein, 450 aa, Artificial Sequence
  Synthesized sequence with two or more selenocysteine residues substituted for two or more cysteine residues
  VARIANT (1)...(450): Xaa = selenocysteine or cysteine
QVQLQQWGAGLLKPSETLSLTXAVYGGSFSGYYWSWIRQPPGKGLEWIGEINHSGSTNYNPSLKSRVTISVDTSKNQFSLKLSSVTAADTAVYYXARGYYDILTGYYYYFDYWGQGTLVTVSSASTKGPSVFPLAPXSRSTSESTAALGXLVKDYFPEPVTVSWNSGALTSGVHTFPAVLQSSGLYSLSSVVTVPSSSLGTKTYTXNVDHKPSNTKVDKRVESKYGPPXPPXPAPEFLGGPSVFLFPPKPKDTLMISRTPEVTXVVVDVSQEDPEVQFNWYVDGVEVHNAKTKPREEQFNSTYRVVSVLTVLHQDWLNGKEYKXKVSNKGLPSSIEKTISKAKGQPREPQVYTLPPSQEEMTKNQVSLTXLVKGFYPSDIAVEWESNGQPENNYKTTPPVLDSDGSFFLYSRLTVDKSRWQEGNVFSXSVMHEALHNHYTQKSLSLSLGK

SEQ ID NO: 762 - protein, 449 aa, Artificial Sequence
  Synthesized sequence with two or more selenocysteine residues substituted for two or more cysteine residues
  VARIANT (1)...(449): Xaa = selenocysteine or cysteine
QVQLVQSGAEVKKPGSSVKVSXKASGYAFTNYLIEWVRQAPGQGLEWIGVIYPGSGGTNYNEKFKGRVTLTVDESTNTAYMELSSLRSEDTAVYFXARRDGNYGWFAYWGQGTLVTVSSASTKGPSVFPLAPSSKSTSGGTAALGXLVKDYFPEPVTVSWNSGALTSGVHTFPAVLQSSGLYSLSSVVTVPSSSLGTQTYIXNVNHKPSNTKVDKKVEPKSXDKTHTXPPXPAPELLGGPSVFLFPPKPKDTLMISRTPEVTXVVVDVSHEDPEVKFNWYVDGVEVHNAKTKPREEQYNSTYRVVSVLTVLHQDWLNGKEYKXKVSNKALPAPIEKTISKAKGQPREPQVYTLPPSRDELTKNQVSLTXLVKGFYPSDIAVEWESNGQPENNYKTTPPVLDSDGSFFLYSKLTVDKSRWQQGNVFSXSVMHEALHNHYTQKSLSLSPGK

SEQ ID NO: 763 - protein, 447 aa, Artificial Sequence
  Synthesized sequence with two or more selenocysteine residues substituted for two or more cysteine residues
  VARIANT (1)...(447): Xaa = selenocysteine or cysteine
QVQLQESGPGLVKPSETLSLTXTVSGFSLIGYDLNWIRQPPGKGLEWIGIIWGDGTTDYNSAVKSRVTISKDTSKNQFSLKLSSVTAADTAVYYXARGGYWYATSYYFDYWGQGTLVTVSSASTKGPSVFPLAPXSRSTSESTAALGXLVKDYFPEPVTVSWNSGALTSGVHTFPAVLQSSGLYSLSSVVTVPSSNFGTQTYTXNVDHKPSNTKVDKTVERKXXVEXPPXPAPPVAGPSVFLFPPKPKDTLMISRTPEVTXVVVDVSHEDPEVQFNWYVDGVEVHNAKTKPREEQFNSTFRVVSVLTVVHQDWLNGKEYKXKVSNKGLPSSIEKTISKTKGQPREPQVYTLPPSREEMTKNQVSLTXLVKGFYPSDIAVEWESNGQPENNYKTTPPMLDSDGSFFLYSKLTVDKSRWQQGNVFSXSVMHEALHNHYTQKSLSLSPGK

SEQ ID NO: 764 - protein, 441 aa, Artificial Sequence
  Synthesized sequence with two or more selenocysteine residues substituted for two or more cysteine residues
  VARIANT (1)...(441): Xaa = selenocysteine or cysteine
EVQLVESGGGLVQPGGSLRLSXAASGFTFSSSGMSWVRQAPGKGLEWVSVIASSGSNTYYADSVKGRFTISRDNSKNTLYLQMNSLRAEDTAVYYXARSIFYTTWGQGTLVTVSSASTKGPSVFPLAPXSRSTSESTAALGXLVKDYFPEPVTVSWNSGALTSGVHTFPAVLQSSGLYSLSSVVTVPSSNFGTQTYTXNVDHKPSNTKVDKTVERKXXVEXPPXPAPPVAGPSVFLFPPKPKDTLMISRTPEVTXVVVDVSHEDPEVQFNWYVDGVEVHNAKTKPREEQFNSTFRVVSVLTVVHQDWLNGKEYKXKVSNKGLPAPIEKTISKTKGQPREPQVYTLPPSREEMTKNQVSLTXLVKGFYPSDIAVEWESNGQPENNYKTTPPMLDSDGSFFLYSKLTVDKSRWQQGNVFSXSVMHEALHNHYTQKSLSLSPGK

SEQ ID NO: 765 - protein, 451 aa, Artificial Sequence
  Synthesized sequence with two or more selenocysteine residues substituted for two or more cysteine residues
  VARIANT (1)...(451): Xaa = selenocysteine or cysteine
QVQLQESGPGLVKPSQTLSLTXAVYGGSFSSGYWNWIRKHPGKGLEYIGYISYNGITYHNPSLKSRITINRDTSKNQYSLQLNSVTPEDTAVYYXARYKYDYDGGHAMDYWGQGTLVTVSSASTKGPSVFPLAPSSKSTSGGTAALGXLVKDYFPEPVTVSWNSGALTSGVHTFPAVLQSSGLYSLSSVVTVPSSSLGTQTYIXNVNHKPSNTKVDKRVEPKSXDKTHTXPPXPAPELLGGPSVFLFPPKPKDTLMISRTPEVTXVVVDVSHEDPEVKFNWYVDGVEVHNAKTKPREEQYNSTYRVVSVLTVLHQDWLNGKEYKXKVSNKALPAPIEKTISKAKGQPREPQVYTLPPSREEMTKNQVSLTXLVKGFYPSDIAVEWESNGQPENNYKTTPPVLDSDGSFFLYSKLTVDKSRWQQGNVFSXSVMHEALHNHYTQKSLSLSPGK

SEQ ID NO: 766 - protein, 445 aa, Artificial Sequence
  Synthesized sequence with two or more selenocysteine residues substituted for two or more cysteine residues
  VARIANT (1)...(445): Xaa = selenocysteine or cysteine
QVQLVQSGAEVKKPGASVKVSXKASGYIFTAYTMHWVRQAPGQGLEWMGWIKPNNGLANYAQKFQGRVTMTRDTSISTAYMELSRLRSDDTAVYYXARSEITTEFDYWGQGTLVTVSSASTKGPSVFPLAPSSKSTSGGTAALGXLVKDYFPEPVTVSWNSGALTSGVHTFPAVLQSSGLYSLSSVVTVPSSSLGTQTYIXNVNHKPSNTKVDKRVEPKSXDXHXPPXPAPELLGGPSVFLFPPKPKDTLMISRTPEVTXVVVDVSHEDPEVKFNWYVDGVEVHNAKTKPREEQYNSTYRVVSVLTVLHQDWLNGKEYKXKVSNKALPAPIEKTISKAKGQPREPQVYTLPPSREEMTKNQVSLTXLVKGFYPSDIAVEWESNGQPENNYKTTPPVLDSDGSFFLYSKLTVDKSRWQQGNVFSXSVMHEALHNHYTQKSLSLSPG

SEQ ID NO: 767 - protein, 456 aa, Artificial Sequence
  Synthesized sequence with two or more selenocysteine residues substituted for two or more cysteine residues
  VARIANT (1)...(456): Xaa = selenocysteine or cysteine
EIQLQQSGPELVKPGASVKVSXKASGYAFTSYNMYWVKQSHGKSLEWIGYIDPYNGVTSYNQKFKGKATLTVDKSSSTAYMHLNSLTSEDSAVYYXARGGGSIYYAMDYWGQGTSVTVSSAKTTPPSVYPLAPGXGDTTGSSVTLGXLVKGYFPESVTVTWNSGSLSSSVHTFPALLQSGLYTMSSSVTVPSSTWPSQTVTXSVAHPASSTTVDKKLEPSGPISTINPXPPXKEXHKXPAPNLEGGPSVFIFPPNIKDVLMISLTPKVTXVVVDVSEDDPDVQISWFVNNVEVHTAQTQTHREDYNSTIRVVSTLPIQHQDWMSGKEFKXKVNNKDLPSPIERTISKIKGLVRAPQVYILPPPAEQLSRKDVSLTXLVVGFNPGDISVEWTSNGHTEENYKDTAPVLDSDGSYFIYSKLNMKTSKWEKTDSFSXNVRHEGLKNYYLKKTISRSPGK

SEQ ID NO: 768 - protein, 449 aa, Artificial Sequence
  Synthesized sequence with two or more selenocysteine residues substituted for two or more cysteine residues
  VARIANT (1)...(449): Xaa = selenocysteine or cysteine
QVQLVQSGGGVVQPGRSLRLSXKASGYTFTRYTMHWVRQAPGKGLEWIGYINPSRGYTNYNQKVKDRFTISRDNSKNTAFLQMDSLRPEDTGVYFXARYYDDHYXLDYWGQGTPVTVSSASTKGPSVFPLAPSSKSTSGGTAALGXLVKDYFPEPVTVSWNSGALTSGVHTFPAVLQSSGLYSLSSVVTVPSSSLGTQTYIXNVNHKPSNTKVDKKVEPKSXDKTHTXPPXPAPEAAGGPSVFLFPPKPKDTLMISRTPEVTXVVVDVSHEDPEVKFNWYVDGVEVHNAKTKPREEQYNSTYRVVSVLTVLHQDWLNGKEYKXKVSNKALPAPIEKTISKAKGQPREPQVYTLPPSRDELTKNQVSLTXLVKGFYPSDIAVEWESNGQPENNYKTTPPVLDSDGSFFLYSKLTVDKSRWQQGNVFSXSVMHEALHNHYTQKSLSLSPGK

SEQ ID NO: 769 - protein, 448 aa, Artificial Sequence
  Synthesized sequence with two or more selenocysteine residues substituted for two or more cysteine residues
  VARIANT (1)...(448): Xaa = selenocysteine or cysteine
QVELVESGGGVVQPGRSQRLSXAASGFTFSSYGMHWVRQAPGKGLEWVAIIWFDGSSTYYADSVRGRFTISRDNSKNTLYLQMNSLRAEDTAVYFXARELGRRYFDLWGRGTLVSVSSASTKGPSVFPLAPSSKSTSGGTAALGXLVKDYFPEPVTVSWNSGALTSGVHTFPAVLQSSGLYSLSSVVTVPSSSLGTQTYIXNVNHKPSNTKVDKKVEPKSXDKTHTXPPXPAPELLGGPSVFLFPPKPKDTLMISRTPEVTXVVVDVSHEDPEVKFNWYVDGVEVHNAKTKPREEQYNSTYRVVSVLTVLHQDWLNGKEYKXKVSNKALPAPIEKTISKAKGQPREPQVYTLPPSRDELTKNQVSLTXLVKGFYPSDIAVEWESNGQPENNYKTTPPVLDSDGSFFLYSKLTVDKSRWQQGNVFSXSVMHEALHNHYTQKSLSLSPGK

SEQ ID NO: 770 - protein, 446 aa, Artificial Sequence
  Synthesized sequence with two or more selenocysteine residues substituted for two or more cysteine residues
  VARIANT (1)...(446): Xaa = selenocysteine or cysteine
EVQLVQSGAEVKKPGSSVKVSXKASGGTFSSYAISWVRQAPGQGLEWMGGIGPFFGTANYAQKFQGRVTITADESTSTAYMELSSLRSEDTAVYYXARDTPYFDYWGQGTLVTVSSASTKGPSVFPLAPSSKSTSGGTAALGXLVKDYFPEPVTVSWNSGALTSGVHTFPAVLQSSGLYSLSSVVTVPSSSLGTQTYIXNVNHKPSNTKVDKRVEPKSXDKTHTXPPXPAPEAAGGPSVFLFPPKPKDTLMISRTPEVTXVVVDVSHEDPEVKFNWYVDGVEVHNAKTKPREEQYNSTYRVVSVLTVLHQDWLNGKEYKXKVSNKALPAPIEKTISKAKGQPREPQVYTLPPSREEMTKNQVSLTXLVKGFYPSDIAVEWESNGQPENNYKTTPPVLDSDGSFFLYSKLTVDKSRWQQGNVFSXSVMHEALHNHYTQKSLSLSPGK

SEQ ID NO: 771 - protein, 448 aa, Artificial Sequence
  Synthesized sequence with two or more selenocysteine residues substituted for two or more cysteine residues
  VARIANT (1)...(448): Xaa = selenocysteine or cysteine
QMQLVESGGGVVQPGRSLRLSXAASGFTFRTYGMHWVRQAPGKGLEWVAVIWYDGSNKHYADSVKGRFTITRDNSKNTLNLQMNSLRAEDTAVYYXARAPQWELVHEAFDIWGQGTMVTVSSASTKGPSVFPLAPXSRSTSESTAALGXLVKDYFPEPVTVSWNSGALTSGVHTFPAVLQSSGLYSLSSVVTVPSSNFGTQTYTXNVDHKPSNTKVDKTVERKXXVEXPPXPAPPVAGPSVFLFPPKPKDTLMISRTPEVTXVVVDVSHEDPEVQFNWYVDGVEVHNAKTKPREEQFNSTFRVVSVLTVVHQDWLNGKEYKXKVSNKGLPAPIEKTISKTKGQPREPQVYTLPPSREEMTKNQVSLTXLVKGFYPSDIAVEWESNGQPENNYKTTPPMLDSDGSFFLYSKLTVDKSRWQQGNVFSXSVMHEALHNHYTQKSLSLSPGK

SEQ ID NO: 772 - protein, 449 aa, Artificial Sequence
  Synthesized sequence with two or more selenocysteine residues substituted for two or more cysteine residues
  VARIANT (1)...(449): Xaa = selenocysteine or cysteine
EVQLVESGGGLVQPGGSLRLSXAASGFTFSSYVMSWVRQAPGKGLEWVATISSGGSYTYYPDSVKGRFTISRDNAKNTLYLQMNSLRAEDTAVYYXARRGDSMITTDYWGQGTLVTVSSASTKGPSVFPLAPSSKSTSGGTAALGXLVKDYFPEPVTVSWNSGALTSGVHTFPAVLQSSGLYSLSSVVTVPSSSLGTQTYIXNVNHKPSNTKVDKRVEPKSXDKTHTXPPXPAPELLGGPSVFLFPPKPKDTLMISRTPEVTXVVVDVSHEDPEVKFNWYVDGVEVHNAKTKPREEQYNSTYRVVSVLTVLHQDWLNGKEYKXKVSNKALPAPIEKTISKAKGQPREPQVYTLPPSREEMTKNQVSLTXLVKGFYPSDIAVEWESNGQPENNYKTTPPVLDSDGSFFLYSKLTVDKSRWQQGNVFSXSVMHEALHNHYTQKSLSLSPGK

SEQ ID NO: 773 - protein, 446 aa, Artificial Sequence
  Synthesized sequence with two or more selenocysteine residues substituted for two or more cysteine residues
  VARIANT (1)...(446): Xaa = selenocysteine or cysteine
QVQLVQSGAEVKKPGASVKVSXKASGYIFITYWMTWVRQAPGQGLEWMGQIFPASGSADYNEKFEGRVTMTTDTSTSTAYMELRSLRSDDTAVYYXARGGGGFAYWGQGTLVTVSSASTKGPSVFPLAPSSKSTSGGTAALGXLVKDYFPEPVTVSWNSGALTSGVHTFPAVLQSSGLYSLSSVVTVPSSSLGTQTYIXNVNHKPSNTKVDKKVEPKSXDKTHTXPPXPAPELLGGPSVFLFPPKPKDTLMISRTPEVTXVVVDVSHEDPEVKFNWYVDGVEVHNAKTKPREEQYNSTYRVVSVLTVLHQDWLNGKEYKXKVSNKALPAPIEKTISKAKGQPREPQVYTLPPSRDELTKNQVSLTXLVKGFYPSDIAVEWESNGQPENNYKTTPPVLDSDGSFFLYSKLTVDKSRWQQGNVFSXSVMHEALHNHYTQKSLSLSPGK

SEQ ID NO: 774 - protein, 448 aa, Artificial Sequence
  Synthesized sequence with two or more selenocysteine residues substituted for two or more cysteine residues
  VARIANT (1)...(448): Xaa = selenocysteine or cysteine
EVQLLESGGGLVQPGGSLRLSXAASGFTFSNYAMSWVRQAPGKGLEWVSSISGSGDYTYYTDSVKGRFTISRDNSKNTLYLQMNSLRAEDTAVYYXARSPWGYYLDSWGQGTLVTVSSASTKGPSVFPLAPSSKSTSGGTAALGXLVKDYFPEPVTVSWNSGALTSGVHTFPAVLQSSGLYSLSSVVTVPSSSLGTQTYIXNVNHKPSNTKVDKRVEPKSXDKTHTXPPXPAPELLGGPSVFLFPPKPKDTLMISRTPEVTXVVVDVSHEDPEVKFNWYVDGVEVHNAKTKPREEQYNSTYRVVSVLTVLHQDWLNGKEYKXKVSNKALPAPIEKTISKAKGQPREPQVYTLPPSREEMTKNQVSLTXLVKGFYPSDIAVEWESNGQPENNYKTTPPVLDSDGSFFLYSKLTVDKSRWQQGNVFSXSVMHEALHNHYTQKSLSLSPGK

SEQ ID NO: 775 - protein, 448 aa, Artificial Sequence
  Synthesized sequence with two or more selenocysteine residues substituted for two or more cysteine residues
  VARIANT (1)...(448): Xaa = selenocysteine or cysteine
QVQLQESGPGLVRPSQTLSLTXTVSGYSITSDHAWSWVRQPPGRGLEWIGYISYSGITTYNPSLKSRVTMLRDTSKNQFSLRLSSVTAADTAVYYXARSLARTTAMDYWGQGSLVTVSSASTKGPSVFPLAPSSKSTSGGTAALGXLVKDYFPEPVTVSWNSGALTSGVHTFPAVLQSSGLYSLSSVVTVPSSSLGTQTYIXNVNHKPSNTKVDKKVEPKSXDKTHTXPPXPAPELLGGPSVFLFPPKPKDTLMISRTPEVTXVVVDVSHEDPEVKFNWYVDGVEVHNAKTKPREEQYNSTYRVVSVLTVLHQDWLNGKEYKXKVSNKALPAPIEKTISKAKGQPREPQVYTLPPSRDELTKNQVSLTXLVKGFYPSDIAVEWESNGQPENNYKTTPPVLDSDGSFFLYSKLTVDKSRWQQGNVFSXSVMHEALHNHYTQKSLSLSPG

SEQ ID NO: 776 - protein, 446 aa, Artificial Sequence
  Synthesized sequence with two or more selenocysteine residues substituted for two or more cysteine residues
  VARIANT (1)...(446): Xaa = selenocysteine or cysteine
QVQLVESGGGLVKPGGSLRLSXAASGFTFSDYYMNWIRQAPGKGLEWVSYISSSGSIIYYADSVKGRFTISRDNAKNSLYLQMNSLRAEDTAVYYXAREGRIAARGMDVWGQGTTVTVSSASTKGPSVFPLAPXSRSTSESTAALGXLVKDYFPEPVTVSWNSGALTSGVHTFPAVLQSSGLYSLSSVVTVPSSNFGTQTYTXNVDHKPSNTKVDKTVERKXXVEXPPXPAPPVAGPSVFLFPPKPKDTLMISRTPEVTXVVVDVSHEDPEVQFNWYVDGVEVHNAKTKPREEQFNSTFRVVSVLTVVHQDWLNGKEYKXKVSNKGLPAPIEKTISKTKGQPREPQVYTLPPSREEMTKNQVSLTXLVKGFYPSDIAVEWESNGQPENNYKTTPPMLDSDGSFFLYSKLTVDKSRWQQGNVFSXSVMHEALHNHYTQKSLSLSPGK

SEQ ID NO: 777 - protein, 449 aa, Artificial Sequence
  Synthesized sequence with two or more selenocysteine residues substituted for two or more cysteine residues
  VARIANT (1)...(449): Xaa = selenocysteine or cysteine
QVQLVQSGAEVKKPGASVKVSXKASGYTFTNYGLSWVRQAPGQGLEWMGWISANNGDTNYGQEFQGRVTMTTDTSTSTAYMELRSLRSDDTAVYYXARDSSSSWARWFFDLWGRGTLVTVSSASTKGPSVFPLAPXSRSTSESTAALGXLVKDYFPEPVTVSWNSGALTSGVHTFPAVLQSSGLYSLSSVVTVPSSSLGTKTYTXNVDHKPSNTKVDKRVESKYGPPXPSXPAPEFLGGPSVFLFPPKPKDTLMISRTPEVTXVVVDVSQEDPEVQFNWYVDGVEVHNAKTKPREEQFNSTYRVVSVLTVLHQDWLNGKEYKXKVSNKGLPSSIEKTISKAKGQPREPQVYTLPPSQEEMTKNQVSLTXLVKGFYPSDIAVEWESNGQPENNYKTTPPVLDSDGSFFLYSRLTVDKSRWQEGNVFSXSVMHEALHNHYTQKSLSLSLGK

SEQ ID NO: 778 - protein, 449 aa, Artificial Sequence
  Synthesized sequence with two or more selenocysteine residues substituted for two or more cysteine residues
  VARIANT (1)...(449): Xaa = selenocysteine or cysteine
EVQLVESGGGLVQPGGSLRLSXAASGFNIKDTYIHWVRQAPGKGLEWVARIYPTNGYTRYADSVKGRFTISADTSKNTAYLQMNSLRAEDTAVYYXSRWGGDGFYAMDYWGQGTLVTVSSASTKGPSVFPLAPSSKSTSGGTAALGXLVKDYFPEPVTVSWNSGALTSGVHTFPAVLQSSGLYSLSSVVTVPSSSLGTQTYIXNVNHKPSNTKVDKKVEPKSXDKTHTXPPXPAPELLGGPSVFLFPPKPKDTLMISRTPEVTXVVVDVSHEDPEVKFNWYVDGVEVHNAKTKPREEQYNSTYRVVSVLTVLHQDWLNGKEYKXKVSNKALPAPIEKTISKAKGQPREPQVYTLPPSREEMTKNQVSLTXLVKGFYPSDIAVEWESNGQPENNYKTTPPVLDSDGSFFLYSKLTVDKSRWQQGNVFSXSVMHEALHNHYTQKSLSLSPG

SEQ ID NO: 779 - protein, 449 aa, Artificial Sequence; identical to SEQ ID NO: 778
  Synthesized sequence with two or more selenocysteine residues substituted for two or more cysteine residues
  VARIANT (1)...(449): Xaa = selenocysteine or cysteine

SEQ ID NO: 780 - protein, 454 aa, Artificial Sequence
  Synthesized sequence with two or more selenocysteine residues substituted for two or more cysteine residues
  VARIANT (1)...(454): Xaa = selenocysteine or cysteine
EEQLVESGGGLVKPGGSLRLSXAASGFSFSDXRMYWLRQAPGKGLEWIGVISVKSENYGANYAESVRGRFTISRDDSKNTVYLQMNSLKTEDTAVYYXSASYYRYDVGAWFAYWGQGTLVTVSSASTKGPSVFPLAPSSKSTSGGTAALGXLVKDYFPEPVTVSWNSGALTSGVHTFPAVLQSSGLYSLSSVVTVPSSSLGTQTYIXNVNHKPSNTKVDKKVEPKSXDKTHTXPPXPAPELLGGPSVFLFPPKPKDTLMISRTPEVTXVVVDVSHEDPEVKFNWYVDGVEVHNAKTKPREEQYNSTYRVVSVLTVLHQDWLNGKEYKXKVSNKALPAPIEKTISKAKGQPREPQVYTLPPSRDELTKNQVSLTXLVKGFYPSDIAVEWESNGQPENNYKTTPPVLDSDGSFFLYSKLTVDKSRWQQGNVFSXSVMHEALHNHYTQKSLSLSPGK

SEQ ID NO: 781 - protein, 451 aa, Artificial Sequence
  Synthesized sequence with two or more selenocysteine residues substituted for two or more cysteine residues
  VARIANT (1)...(451): Xaa = selenocysteine or cysteine
QVQLVESGGGVVQPGRSLRLSXAASGFTFSSYGMHWVRQAPGKGLEWVAVIWYDGSNKYYADSVKGRFTISRDNSKNTLYLQMNSLRAEDTAVYYXARDPRGATLYYYYYGMDVWGQGTTVTVSSASTKGPSVFPLAPXSRSTSESTAALGXLVKDYFPEPVTVSWNSGALTSGVHTFPAVLQSSGLYSLSSVVTVPSSNFGTQTYTXNVDHKPSNTKVDKTVERKXXVEXPPXPAPPVAGPSVFLFPPKPKDTLMISRTPEVTXVVVDVSHEDPEVQFNWYVDGVEVHNAKTKPREEQFNSTFRVVSVLTVVHQDWLNGKEYKXKVSNKGLPAPIEKTISKTKGQPREPQVYTLPPSREEMTKNQVSLTXLVKGFYPSDIAVEWESNGQPENNYKTTPPMLDSDGSFFLYSKLTVDKSRWQQGNVFSXSVMHEALHNHYTQKSLSLSPGK

SEQ ID NO: 782 - protein, 447 aa, Artificial Sequence
  Synthesized sequence with two or more selenocysteine residues substituted for two or more cysteine residues
  VARIANT (1)...(447): Xaa = selenocysteine or cysteine
EVQVLESGGDLVQPGGSLRLSXAASGFTFSAYAMTWVRQAPGKGLEWVSAISGSGGSAYYADSVKGRFTISRDNSKNTVYLQMNSLRAEDTAVYYXAKDGAWKMSGLDVWGQGTTVIVSSASTKGPSVFPLAPXSRSTSESTAALGXLVKDYFPEPVTVSWNSGALTSGVHTFPAVLQSSGLYSLSSVVTVPSSSLGTKTYTXNVDHKPSNTKVDKRVESKYGPPXPPXPAPEFLGGPSVFLFPPKPKDTLMISRTPEVTXVVVDVSQEDPEVQFNWYVDGVEVHNAKTKPREEQFNSTYRVVSVLTVLHQDWLNGKEYKXKVSNKGLPSSIEKTISKAKGQPREPQVYTLPPSQEEMTKNQVSLTXLVKGFYPSDIAVEWESNGQPENNYKTTPPVLDSDGSFFLYSRLTVDKSRWQEGNVFSXSVMHEALHNHYTQKSLSLSLGK

SEQ ID NO: 783 - protein, 448 aa, Artificial Sequence
  Synthesized sequence with two or more selenocysteine residues substituted for two or more cysteine residues
  VARIANT (1)...(448): Xaa = selenocysteine or cysteine
QAYLQQSGAELVRPGASVKMSXKASGYTFTSYNMHWVKQTPRQGLEWIGGIYPGNGDTSYNQKFKGKATLTVGKSSSTAYMQLSSLTSEDSAVYFXARYDYNYAMDYWGQGTSVTVSSASTKGPSVFPLAPSSKSTSGGTAALGXLVKDYFPEPVTVSWNSGALTSGVHTFPAVLQSSGLYSLSSVVTVPSSSLGTQTYIXNVNHKPSNTKVDKKVEPKSXDKTHTXPPXPAPELLGGPSVFLFPPKPKDTLMISRTPEVTXVVVDVSHEDPEVKFNWYVDGVEVHNAKTKPREEQYNSTYRVVSVLTVLHQDWLNGKEYKXKVSNKALPAPIEKTISKAKGQPREPQVYTLPPSRDELTKNQVSLTXLVKGFYPSDIAVEWESNGQPENNYKTTPPVLDSDGSFFLYSKLTVDKSRWQQGNVFSXSVMHEALHNHYTQKSLSLSPGK

SEQ ID NO: 784 - protein, 451 aa, Artificial Sequence
  Synthesized sequence with two or more selenocysteine residues substituted for two or more cysteine residues
  VARIANT (1)...(451): Xaa = selenocysteine or cysteine
EVQLVESGGGLVQPGGSLRLSXAAAGFTFSSYSMNWVRQAPGKGLEWVSYISSRSRTIYYADSVKGRFTISRDNAKNSLYLQMNSLRDEDTAVYYXARDYGGQPPYYYYYGMDVWGQGTTVTVSSASTKGPSVFPLAPXSRSTSESTAALGXLVKDYFPEPVTVSWNSGALTSGVHTFPAVLQSSGLYSLSSVVTVPSSSLGTKTYTXNVDHKPSNTKVDKRVESKYGPPXPPXPAPEFLGGPSVFLFPPKPKDTLMISRTPEVTXVVVDVSQEDPEVQFNWYVDGVEVHNAKTKPREEQFNSTYRVVSVLTVLHQDWLNGKEYKXKVSNKGLPSSIEKTISKAKGQPREPQVYTLPPSQEEMTKNQVSLTXLVKGFYPSDIAVEWESNGQPENNYKTTPPVLDSDGSFFLYSRLTVDKSRWQEGNVFSXSVMHEALHNHYTQKSLSLSLG

SEQ ID NO: 785 - protein, 448 aa, Artificial Sequence
  Synthesized sequence with two or more selenocysteine residues substituted for two or more cysteine residues
  VARIANT (1)...(448): Xaa = selenocysteine or cysteine
QVQLQQWGAGLLKPSETLSLTXAVYGGSFSGYYWSWIRQSPEKGLEWIGEINHGGYVTYNPSLESRVTISVDTSKNQFSLKLSSVTAADTAVYYXARDYGPGNYDWYFDLWGRGTLVTVSSASTKGPSVFPLAPXSRSTSESTAALGXLVKDYFPEPVTVSWNSGALTSGVHTFPAVLQSSGLYSLSSVVTVPSSSLGTKTYTXNVDHKPSNTKVDKRVESKYGPPXPPXPAPEFLGGPSVFLFPPKPKDTLMISRTPEVTXVVVDVSQEDPEVQFNWYVDGVEVHNAKTKPREEQFNSTYRVVSVLTVLHQDWLNGKEYKXKVSNKGLPSSIEKTISKAKGQPREPQVYTLPPSQEEMTKNQVSLTXLVKGFYPSDIAVEWESNGQPENNYKTTPPVLDSDGSFFLYSRLTVDKSRWQEGNVFSXSVMHEALHNHYTQKSLSLSLGK

SEQ ID NO: 786 - protein, 449 aa, Artificial Sequence
  Synthesized sequence with two or more selenocysteine residues substituted for two or more cysteine residues
  VARIANT (1)...(449): Xaa = selenocysteine or cysteine
EVQLVQSGAEVKKPGESLKISXKGSGYSFTTYWLGWVRQMPGKGLDWIGIMSPVDSDIRYSPSFQGQVTMSVDKSITTAYLQWNSLKASDTAMYYXARRRPGQGYFDFWGQGTLVTVSSSSTKGPSVFPLAPSSKSTSGGTAALGXLVKDYFPEPVTVSWNSGALTSGVHTFPAVLQSSGLYSLSSVVTVPSSSLGTQTYIXNVNHKPSNTKVDKRVEPKSXDKTHTXPPXPAPELLGGPSVFLFPPKPKDTLMISRTPEVTXVVVDVSHEDPEVKFNWYVDGVEVHNAKTKPREEQYNSTYRVVSVLTVLHQDWLNGKEYKXKVSNKALPAPIEKTISKAKGQPREPQVYTLPPSRDELTKNQVSLTXLVKGFYPSDIAVEWESNGQPENNYKTTPPVLDSDGSFFLYSKLTVDKSRWQQGNVFSXSVMHEALHNHYTQKSLSLSPGK

SEQ ID NO: 787 - protein, 442 aa, Artificial Sequence
  Synthesized sequence with two or more selenocysteine residues substituted for two or more cysteine residues
  VARIANT (1)...(442): Xaa = selenocysteine or cysteine
EVQLVQSGAEVKKPGESLRISXKGSGYSFSTYWISWVRQMPGKGLEWMGKIYPGDSYTNYSPSFQGQVTISADKSISTAYLQWSSLKASDTAMYYXARGYGIFDYWGQGTLVTVSSASTKGPSVFPLAPXSRSTSESTAALGXLVKDYFPEPVTVSWNSGALTSGVHTFPAVLQSSGLYSLSSVVTVPSSNFGTQTYTXNVDHKPSNTKVDKTVERKXXVEXPPXPAPPVAGPSVFLFPPKPKDTLMISRTPEVTXVVVDVSHEDPEVQFNWYVDGVEVHNAKTKPREEQFNSTFRVVSVLTVVHQDWLNGKEYKXKVSNKGLPAPIEKTISKTKGQPREPQVYTLPPSREEMTKNQVSLTXLVKGFYPSDIAVEWESNGQPENNYKTTPPMLDSDGSFFLYSKLTVDKSRWQQGNVFSXSVMHEALHNHYTQKSLSLSPGK

SEQ ID NO: 788 - protein, 447 aa, Artificial Sequence
  Synthesized sequence with two or more selenocysteine residues substituted for two or more cysteine residues
  VARIANT (1)...(447): Xaa = selenocysteine or cysteine
QVQLVQSGAEVKKPGASVKVSXKASGYTFTNYDINWVRQAPGQGLEWIGWIYPGDGSTKYNEKFKAKATLTADTSTSTAYMELRSLRSDDTAVYYXASGYEDAMDYWGQGTTVTVSSASTKGPSVFPLAPSSKSTSGGTAALGXLVKDYFPEPVTVSWNSGALTSGVHTFPAVLQSSGLYSLSSVVTVPSSSLGTQTYIXNVNHKPSNTKVDKKVEPKSXDKTHTXPPXPAPELLGGPXVFLFPPKPKDTLMISRTPEVTXVVVDVSHEDPEVKFNWYVDGVEVHNAKTKPREEQYNSTYRVVSVLTVLHQDWLNGKEYKXKVSNKALPAPIEKTISKAKGQPREPQVYTLPPSRDELTKNQVSLTXLVKGFYPSDIAVEWESNGQPENNYKTTPPVLDSDGSFFLYSKLTVDKSRWQQGNVFSXSVMHEALHNHYTQKSLSLSPGK

SEQ ID NO: 789 - protein, 454 aa, Artificial Sequence
  Synthesized sequence with two or more selenocysteine residues substituted for two or more cysteine residues
  VARIANT (1)...(454): Xaa = selenocysteine or cysteine
EVQLVESGGGLVQPGGSLRLSXAVSGYSITSDYAWNWVRQAPGKGLEWVGYISNSGSTSYNPSLKSRFTISRDTSKNTLYLQMNSLRAEDTAVYYXARERNYDYDDYYYAMDYWGQGTLVTVSSASTKGPSVFPLAPSSKSTSGGTAALGXLVKDYFPEPVTVSWNSGALTSGVHTFPAVLQSSGLYSLSSVVTVPSSSLGTQTYIXNVNHKPSNTKVDKKVEPKSXDKTHTXPPXPAPELLGGPSVFLFPPKPKDTLMISRTPEVTXVVVDVSHEDPEVKFNWYVDGVEVHNAKTKPREEQYNSTYRVVSVLTVLHQDWLNGKEYKXKVSNKALPAPIEKTISKAKGQPREPQVYTLPPSREEMTKNQVSLTXLVKGFYPSDIAVEWESNGQPENNYKTTPPVLDSDGSFFLYSKLTVDKSRWQQGNVFSXSVMHEALHNHYTQKSLSLSPGK

SEQ ID NO: 790 - protein, 443 aa, Artificial Sequence
  Synthesized sequence with two or more selenocysteine residues substituted for two or more cysteine residues
  VARIANT (1)...(443): Xaa = selenocysteine or cysteine
EVQLVESGGGLVQPGGSLRLSXAASGFTFSHYTLSWVRQAPGKGLEWVSVISGDGSYTYYADSVKGRFTISSDNSKNTLYLQMNSLRAEDTAVYYXARNFIKYVFANWGQGTLVTVSSASTKGPSVFPLAPXSRSTSESTAALGXLVKDYFPEPVTVSWNSGALTSGVHTFPAVLQSSGLYSLSSVVTVPSSNFGTQTYTXNVDHKPSNTKVDKTVERKXXVEXPPXPAPPVAGPSVFLFPPKPKDTLMISRTPEVTXVVVDVSHEDPEVQFNWYVDGVEVHNAKTKPREEQFNSTFRVVSVLTVVHQDWLNGKEYKXKVSNKGLPAPIEKTISKTKGQPREPQVYTLPPSREEMTKNQVSLTXLVKGFYPSDIAVEWESNGQPENNYKTTPPMLDSDGSFFLYSKLTVDKSRWQQGNVFSXSVMHEALHNHYTQKSLSLSPG

SEQ ID NO: 791 - protein, 463 aa, Artificial Sequence
  Synthesized sequence with two or more selenocysteine residues substituted for two or more cysteine residues
  VARIANT (1)...(463): Xaa = selenocysteine or cysteine
QVQLVQSGAEVKKPGASVKVSXKASGYTFTGYYMHWVRQAPGQGLEWMGWINPNSGGTNYAQKFQGRVTMTRDTSISTAYMELSRLRSDDTAVYYXARSPNPYYYDSSGYYYPGAFDIWGQGTMVTVSSASVAAPSVFIFPPSDEQLKSGTASVVXLLNNFYPREAKVQWKVDNALQSGNSQESVTEQDSKDSTYSLSSTLTLSKADYEKHKVYAXEVTHQGLSSPVTKSFNRGEXDKTHTXPPXPAPELLGGPSVFLFPPKPKDTLMISRTPEVTXVVVDVSHEDPEVKFNWYVDGVEVHNAKTKPREEQYNSTYRVVSVLTVLHQDWLNGKEYKXKVSNKALPAPIEKTISKAKGQPREPQVXTLPPSRDELTKNQVSLSXAVKGFYPSDIAVEWESNGQPENNYKTTPPVLDSDGSFFLVSKLTVDKSRWQQGNVFSXSVMHEALHNHYTQKSLSLSPGK

SEQ ID NO: 792 - protein, 452 aa, Artificial Sequence
  Synthesized sequence with two or more selenocysteine residues substituted for two or more cysteine residues
  VARIANT (1)...(452): Xaa = selenocysteine or cysteine
QVQLVESGGGVVQPGRSLRLSXAASGFTFSSYDMHWVRQAPGKGLEWVAVIWYDGSNKYYADSVKGRFTISRDNSKNTLYLQMNSLRAEDTAVYYXARGSGNWGFFDYWGQGTLVTVSSASTKGPSVFPLAPSSKSTSGGTAALGXLVKDYFPEPVTVSWNSGALTSGVHTFPAVLQSSGLYSLSSVVTVPSSSLGTQTYIXNVNHKPSNTKVDKKVEPKSXDKTHTXPPXPAPELLGGPSVFLFPPKPKDTLMISRTPEVTXVVVDVSHEDPEVKFNWYVDGVEVHNAKTKPREEQYNSTYRVVSVLTVLHQDWLNGKEYKXKVSNKALPAPIEKTISKAKGQPREPQVYTLPPSRDELTKNQVSLTXLVKGFYPSDIAVEWESNGQPENNYKTTPPVLDSDGSFFLYSKLTVDKSRWQQGNVFSXSVMHEALHNHYTQKSLSLSPGKGSS

SEQ ID NO: 793 - protein, 446 aa, Artificial Sequence
  Synthesized sequence with two or more selenocysteine residues substituted for two or more cysteine residues
  VARIANT (1)...(446): Xaa = selenocysteine or cysteine
QVQLQESGPGLVKPSETLSLTXTVSGFSLTNYGIHWIRQPPGKGLEWLGVIWARGFTNYNSALMSRLTISKDNSKNQVSLKLSSVTAADTAVYYXARANDGVYYAMDYWGQGTLVTVSSASTKGPSVFPLAPXSRSTSESTAALGXLVKDYFPEPVTVSWNSGALTSGVHTFPAVLQSSGLYSLSSVVTVPSSSLGTKTYTXNVDHKPSNTKVDKRVESKYGPPXPSXPAPEFLGGPSVFLFPPKPKDTLMISRTPEVTXVVVDVSQEDPEVQFNWYVDGVEVHNAKTKPREEQFNSTYRVVSVLTVLHQDWLNGKEYKXKVSNKGLPSSIEKTISKAKGQPREPQVYTLPPSQEEMTKNQVSLTXLVKGFYPSDIAVEWESNGQPENNYKTTPPVLDSDGSFFLYSRLTVDKSRWQEGNVFSXSVMHEALHNHYTQKSLSLSLGK

SEQ ID NO: 794 - protein, 451 aa, Artificial Sequence
  Synthesized sequence with two or more selenocysteine residues substituted for two or more cysteine residues
  VARIANT (1)...(451): Xaa = selenocysteine or cysteine
QVQLVQSGAEVKKPGASVKVSXKGSGYTFTSYWMHWVRQAPGQRLEWIGEIDPSESNTNYNQKFKGRVTLTVDISASTAYMELSSLRSEDTAVYYXARGGYDGWDYAIDYWGQGTLVTVSSASTKGPSVFPLAPSSKSTSGGTAALGXLVKDYFPEPVTVSWNSGALTSGVHTFPAVLQSSGLYSLSSVVTVPSSSLGTQTYIXNVNHKPSNTKVDKKVEPKSXDKTHTXPPXPAPELAGAPSVFLFPPKPKDTLMISRTPEVTXVVVDVSHEDPEVKFNWYVDGVEVHNAKTKPREEQYNSTYRVVSVLTVLHQDWLNGKEYKXKVSNKALPAPIEKTISKAKGQPREPQVYTLPPSRDELTKNQVSLTXLVKGFYPSDIAVEWESNGQPENNYKTTPPVLDSDGSFFLYSKLTVDKSRWQQGNVFSXSVMHEALHNHYTQKSLSLSPGK

SEQ ID NO: 795 - protein, 451 aa, Artificial Sequence
  Synthesized sequence with two or more selenocysteine residues substituted for two or more cysteine residues
  VARIANT (1)...(451): Xaa = selenocysteine or cysteine
QVQLQQSGAEVKKPGSSVKVSXKASGYTFTSYNMHWVKQAPGQGLEWIGAIYPGMGDTSYNQKFKGKATLTADESTNTAYMELSSLRSEDTAFYYXARSTYYGGDWYFDVWGQGTTVTVSSASTKGPSVFPLAPSSKSTSGGTAALGXLVKDYFPEPVTVSWNSGALTSGVHTFPAVLQSSGLYSLSSVVTVPSSSLGTQTYIXNVNHKPSNTKVDKRVEPKSXDKTHTXPPXPAPELLGGPSVFLFPPKPKDTLMISRTPEVTXVVVDVSHEDPEVKFNWYVDGVEVHNAKTKPREEQYNSTYRVVSVLTVLHQDWLNGKEYKXKVSNKALPAPIEKTISKAKGQPREPQVYTLPPSREEMTKNQVSLTXLVKGFYPSDIAVEWESNGQPENNYKTTPPVLDSDGSFFLYSKLTVDKSRWQQGNVFSXSVMHEALHNHYTQKSLSLSPGK

SEQ ID NO: 796 - protein, 453 aa, Artificial Sequence
  Synthesized sequence with two or more selenocysteine residues substituted for two or more cysteine residues
  VARIANT (1)...(453): Xaa = selenocysteine or cysteine
EVQLVESGGGLVQPGGSLRLSXAASGFTFSSYAMSWVRQAPGKGLEWVSQISPAGGYTNYADSVKGRFTISADTSKNTAYLQMNSLRAEDTAVYYXARGELPYYRMSKVMDVWGQGTLVTVSSASTKGPSVFPLAPSSKSTSGGTAALGXLVKDYFPEPVTVSWNSGALTSGVHTFPAVLQSSGLYSLSSVVTVPSSSLGTQTYIXNVNHKPSNTKVDKKVEPKSXDKTHTXPPXPAPELLGGPSVFLFPPKPKDTLMISRTPEVTXVVVDVSHEDPEVKFNWYVDGVEVHNAKTKPREEQYNSTYRVVSVLTVLHQDWLNGKEYKXKVSNKALPAPIEKTISKAKGQPREPQVYTLPPSREEMTKNQVSLTXLVKGFYPSDIAVEWESNGQPENNYKTTPPVLDSDGSFFLYSKLTVDKSRWQQGNVFSXSVMHEALHNHYTQKSLSLSPGK

SEQ ID NO: 797 - protein, 446 aa, Artificial Sequence
  Synthesized sequence with two or more selenocysteine residues substituted for two or more cysteine residues
  VARIANT (1)...(446): Xaa = selenocysteine or cysteine
QVQLVQSGAEVKKPGASVKVSXKASGYTFISYTMHWVRQAPGQGLEWMGYINPRSGYTHYNQKLKDKATLTADKSASTAYMELSSLRSEDTAVYYXARSAYYDYDGFAYWGQGTLVTVSSASTKGPSVFPLAPXSRSTSESTAALGXLVKDYFPEPVTVSWNSGALTSGVHTFPAVLQSSGLYSLSSVVTVPSSNFGTQTYTXNVDHKPSNTKVDKTVERKXXVEXPPXPAPPAAAPSVFLFPPKPKDTLMISRTPEVTXVVVDVSHEDPEVQFNWYVDGVEVHNAKTKPREEQFNSTFRVVSVLTVVHQDWLNGKEYKXKVSNKGLPAPIEKTISKTKGQPREPQVYTLPPSREEMTKNQVSLTXLVKGFYPSDIAVEWESNGQPENNYKTTPPMLDSDGSFFLYSKLTVDKSRWQQGNVFSXSVMHEALHNHYTQKSLSLSPSK

SEQ ID NO: 798 - protein, 451 aa, Artificial Sequence
  Synthesized sequence with two or more selenocysteine residues substituted for two or more cysteine residues
  VARIANT (1)...(451): Xaa = selenocysteine or cysteine
QVQLKESGPGLVAPSQSLSITXTISGFSLTDYGVHWVRQPPGKGLEWLVVIWSDGSSTYNSALKSRMTIRKDNSKSQVFLIMNSLQTDDSAMYYXARHGTYYGMTTTGDALDYWGQGTSVTVSSASTKGPSVFPLAPXSRSTSESTAALGXLVKDYFPEPVTVSWNSGALTSGVHTFPAVLQSSGLYSLSSVVTVPSSSLGTKTYTXNVDHKPSNTKVDKRVESKYGPPXPSXPAPEFLGGPSVFLFPPKPKDTLMISRTPEVTXVVVDVSQEDPEVQFNWYVDGVEVHNAKTKPREEQFNSTYRVVSVLTVLHQDWLNGKEYKXKVSNKGLPSSIEKTISKAKGQPREPQVYTLPPSQEEMTKNQVSLTXLVKGFYPSDIAVEWESNGQPENNYKTTPPVLDSDGSFFLYSRLTVDKSRWQEGNVFSXSVMHEALHNHYTQKSLSLSLGK

SEQ ID NO: 799 - protein, 448 aa, Artificial Sequence
  Synthesized sequence with two or more selenocysteine residues substituted for two or more cysteine residues
  VARIANT (1)...(448): Xaa = selenocysteine or cysteine
QVQLVQSGAEVKKPGASVKVSXKASGYTFTNYGMNWVRQAPGQGLKWMGWINTYTGEPTYADAFKGRVTMTRDTSISTAYMELSRLRSDDTAVYYXARDYGDYGMDYWGQGTTVTVSSASTKGPSVFPLAPSSKSTSGGTAALGXLVKDYFPEPVTVSWNSGALTSGVHTFPAVLQSSGLYSLSSVVTVPSSSLGTQTYIXNVNHKPSNTKVDKKVEPKSXDKTHTXPPXPAPELLGGPSVFLFPPKPKDTLMISRTPEVTXVVVDVSHEDPEVKFNWYVDGVEVHNAKTKPREEQYNSTYRVVSVLTVLHQDWLNGKEYKXKVSNKALPAPIEKTISKAKGQPREPQVYTLPPSRDELTKNQVSLTXLVKGFYPSDIAVEWESNGQPENNYKTTPPVLDSDGSFFLYSKLTVDKSRWQQGNVFSXSVMHEALHNHYTQKSLSLSPGK

SEQ ID NO: 800 - protein, 447 aa, Artificial Sequence
  Synthesized sequence with two or more selenocysteine residues substituted for two or more cysteine residues
  VARIANT (1)...(447): Xaa = selenocysteine or cysteine
QVELVESGGGLVQPGGSLRLSXAASGFTFTSYWMSWVRQAPGKGLELVSSITSYGSFTYYADSVKGRFTISRDNSKNTLYLQMNSLRAEDTAVYYXARNMYTHFDSWGQGTLVTVSSASTKGPSVFPLAPSSKSTSGGTAALGXLVKDYFPEPVTVSWNSGALTSGVHTFPAVLQSSGLYSLSSVVTVPSSSLGTQTYIXNVNHKPSNTKVDKKVEPKSXDKTHTXPPXPAPELLGGPSVFLFPPKPKDTLMISRTPEVTXVVVDVSHEDPEVKFNWYVDGVEVHNAKTKPREEQYNSTYRVVSVLTVLHQDWLNGKEYKXKVSNKALPAPIEKTISKAKGQPREPQVYTLPPSRDELTKNQVSLTXLVKGFYPSDIAVEWESNGQPENNYKTTPPVLDSDGSFFLYSKLTVDKSRWQQGNVFSXSVMHEALHNHYTQKSLSLSPGK

SEQ ID NO: 801 - protein, 448 aa, Artificial Sequence
  Synthesized sequence with two or more selenocysteine residues substituted for two or more cysteine residues
  VARIANT (1)...(448): Xaa = selenocysteine or cysteine
QVQLQQPGAELVEPGGSVKLSXKASGYTFTSHWMHWVKQRPGQGLEWIGEINPSSGRNNYNEKFKSKATLTVDKSSSTAYMQFSSLTSEDSAVYYXVRYYGYDEAMDYWGQGTSVTVSSASTKGPSVFPLAPSSKSTSGGTAALGXLVKDYFPEPVTVSWNSGALTSGVHTFPAVLQSSGLYSLSSVVTVPSSSLGTQTYIXNVNHKPSNTKVDKRVEPKSXDKTHTXPPXPAPELLGGPSVFLFPPKPKDTLMISRTPEVTXVVVDVSHEDPEVKFNWYVDGVEVHNAKTKPREEQYNSTYRVVSVLTVLHQDWLNGKEYKXKVSNKALPAPIEKTISKAKGQPREPQVYTLPPSREEMTKNQVSLTXLVKGFYPSDIAVEWESNGQPENNYKTTPPVLDSDGSFFLYSKLTVDKSRWQQGNVFSXSVMHEALHNHYTQKSLSLSPG

SEQ ID NO: 802 - protein, 232 aa, Artificial Sequence
  Synthesized sequence with two or more selenocysteine residues substituted for two or more cysteine residues
  VARIANT (1)...(232): Xaa = selenocysteine or cysteine
MLPSQLIGFLLLWVPASRGEIVLTQSPDFQSVTPKEKVTITXRASQSIGISHWYQQKPDQSPKLLIKYASQSFSGVPSRFSGSGSGTDFTLTINSLEAEDAATYYXHQSRSFPWTFGQGTKVEIKRTVAAPSVFIFPPSDEQLKSGTASVVXLLNNFYPREAKVQWKVDNALQSGNSQESVTEQDSKDSTYSLSSTLTLSKADYEKHKVYAXEVTHQGLSSPVTKSFNRGEX

SEQ ID NO: 803 - protein, 212 aa, Artificial Sequence
  Synthesized sequence with two or more selenocysteine residues substituted for two or more cysteine residues
  VARIANT (1)...(212): Xaa = selenocysteine or cysteine
DIQMTQSPSTLSASVGDRVTITXRASQSISSWLAWYQQKPGKAPKLLIYKASSLESGVPSRFSGSGSGTEFTLTISSLQPDDFATYYXQQYNSYIFGQGTKLEIKRTVAAPSVFIFPPSDEQLKSGTASVVXLLNNFYPREAKVQWKVDNALQSGNSQESVTEQDSKDSTYSLSSTLTLSKADYEKHKVYAXEVTHQGLSSPVTKSFNRGEX

SEQ ID NO: 804 - protein, 236 aa, Artificial Sequence
  Synthesized sequence with two or more selenocysteine residues substituted for two or more cysteine residues
  VARIANT (1)...(236): Xaa = selenocysteine or cysteine
MDMRVPAQLLGLLLLWLPDTRXDIQMTQSPSTLSASIGDRVTITXRASQGISYYLAWYQQKPGKIPKLLIYDTSSLQSGVPSRFSGSRSGTDLSLTISSLQPEDVATYYXQRYDSAPLTFGGGTKVEIKRTVAAPSVFIFPPSDEQLKSGTASVVXLLNNFYPREAKVQWKVDNALQSGNSQESVTEQDSKDSTYSLSSTLTLSKADYEKHKVYAXEVTHQGLSSPVTKSFNRGEX

SEQ ID NO: 805 - protein, 219 aa, Artificial Sequence
  Synthesized sequence with two or more selenocysteine residues substituted for two or more cysteine residues
  VARIANT (1)...(219): Xaa = selenocysteine or cysteine
DVVMTQSPLSLSVTLGQPASISXRSSQSIVHSNGNTYLEWYLQKPGQSPQLLIYKVSNRFSGVPDRFSGSGSGTDFTLKISRVEAEDVGVYYXFQGSHVPLTFGQGTKLEIKRTVAAPSVFIFPPSDEQLKSGTASVVXLLNNFYPREAKVQWKVDNALQSGNSQESVTEQDSKDSTYSLSSTLTLSKADYEKHKVYAXEVTHQGLSSPVTKSFNRGEX

SEQ ID NO: 806 - protein, 219 aa, Artificial Sequence
  Synthesized sequence with two or more selenocysteine residues substituted for two or more cysteine residues
  VARIANT (1)...(219): Xaa = selenocysteine or cysteine
DVVMTQTPLTLSVTIGQPASISXKSSQSLLDSDGKTYLNWLLQRPGQSPKRLIYLVSKLDSGVPDRFTGSGSGTDFTLKISRVEAEDLGVYYXWQGTHFPLTFGAGTKLELKRADAAPTVSIFPPSSEQLTSGGASVVXFLNNFYPKDINVKWKIDGSERQNGVLNSWTDQDSKDSTYSMSSTLTLTKDEYERHNSYTXEATHKTSTSPIVKSFNRNEX

SEQ ID NO: 807 - protein, 219 aa, Artificial Sequence
  Synthesized sequence with two or more selenocysteine residues substituted for two or more cysteine residues
  VARIANT (1)...(219): Xaa = selenocysteine or cysteine
DIQMTQSPSSLSASVGDRVTITXRSSQSIVHNDGNTYFEWYQQKPGKAPKLLIYKVSNRFSGVPSRFSGSGSGTHFTLTISSLQPEDFATYYXFQGSYVPLTFGQGTKVEIKRTVAAPSVFIFPPSDEQLKSGTASVVXLLNNFYPREAKVQWKVDNALQSGNSQESVTEQDSKDSTYSLSSTLTLSKADYEKHKVYAXEVTHQGLSSPVTKSFNRGEX

SEQ ID NO: 808 - protein, 236 aa, Artificial Sequence
  Synthesized sequence with two or more selenocysteine residues substituted for two or more cysteine residues
  VARIANT (1)...(236): Xaa = selenocysteine or cysteine
MDMRVPAQLLGLLLLWLSGARXDIQMTQSPSSLSASVGDRVTITXQASQDIINYLNWYQQKPGKAPKLLIYSASNLETRVPSRFSGSGSGTDFTFTISSLQPEDIATYYXQQYDNHPLTFGGGTKVEIRRTVAAPSVFIFPPSDEQLKSGTASVVXLLNNFYPREAKVQWKVDNALQSGNSQESVTEQDSKDSTYSLSSTLTLSKADYEKHKVYAXEVTHQGLSSPVTKSFNRGEX

SEQ ID NO: 809 - protein, 219 aa, Artificial Sequence
  Synthesized sequence with two or more selenocysteine residues substituted for two or more cysteine residues
  VARIANT (1)...(219): Xaa = selenocysteine or cysteine
DIVMTQSPLSLPVTPGEPASISXRSSQSLLLSHGFNYLDWYLQKPGQSPQLLIYLGSSRASGVPDRFSGSGSGTDFTLKISRVEAEDVGLYYXMQPLQIPWTFGQGTKVEIKRTVAAPSVFIFPPSDEQLKSGTASVVXLLNNFYPREAKVQWKVDNALQSGNSQESVTEQDSKDSTYSLSSTLTLSKADYEKHKVYAXEVTHQGLSSPVTKSFNRGEX

SEQ ID NO: 810 - protein, 241 aa, Artificial Sequence
  Synthesized sequence with two or more selenocysteine residues substituted for two or more cysteine residues
  VARIANT (1)...(241): Xaa = selenocysteine or cysteine
MDMRLPAQLLGLLMLWVPGSSGDVLMTQSPLSLPVTLGQPASISXRSSQSIVHSNGNTYLEWYLQRPGQSPKLLIYKVSNRFSGVPDRFSGSGSGTDFTLKISRVEAEDVGVYYXFQGSHVPLTFGAGTKLEIKRTVAAPSVFIFPPSDEQLKSGTASVVXLLNNFYPREAKVQWKVDNALQSGNSQESVTEQDSKDSTYSLSSTLTLSKADYEKHKVYAXEVTHQGLSSPVTKSFNRGEX

SEQ ID NO: 811 - protein, 214 aa, Artificial Sequence
  Synthesized sequence with two or more selenocysteine residues substituted for two or more cysteine residues
  VARIANT (1)...(214): Xaa = selenocysteine or cysteine
DIQLTQSQSFVSTSVGDRVTVTXRASQNVGSSLVWYQQKPGKSPKTLIYSASFLYSGVPSRFSGSGSGTEFTLTISSVQPEDFADYFXQQYNNYPLTFGGGTKVEIKRTVAAPSVFIFPPSDEQLKSGTASVVXLLNNFYPREAKVQWKVDNALQSGNSQESVTEQDSKDSTYSLSSTLTLSKADYEKHKVYAXEVTHQGLSSPVTKSFNRGEX

SEQ ID NO: 812 - protein, 212 aa, Artificial Sequence
  Synthesized sequence with two or more selenocysteine residues substituted for two or more cysteine residues
  VARIANT (1)...(212): Xaa = selenocysteine or cysteine
SYELTQPPSVSVSPGQTARITXSGDNLPKYYAHWYQQKPGQAPVVVIFYDVNRPSGIPERFSGSNSGNTATLTISGTQAMDEADYYXQAWWSSTPVFGGGTKLTVLGQPKAAPSVTLFPPSSEELQANKATLVXLISDFYPGAVTVAWKADSSPVKAGVETTTPSKQSNNKYAASSYLSLTPEQWKSHRSYSXQVTHEGSTVEKTVAPTEXS

SEQ ID NO: 813 - protein, 214 aa, Artificial Sequence
  Synthesized sequence with two or more selenocysteine residues substituted for two or more cysteine residues
  VARIANT (1)...(214): Xaa = selenocysteine or cysteine
EIVLTQSPATLSLSPGERATLSXRASQSVSSYLAWYQQKPGQAPRLLIYDASNRATGIPARFSGSGSGTDFTLTISSLEPEDFAVYYXQQRSNWPLTFGGGTKVEIKRTVAAPSVFIFPPSDEQLKSGTASVVXLLNNFYPREAKVQWKVDNALQSGNSQESVTEQDSKDSTYSLSSTLTLSKADYEKHKVYAXEVTHQGLSSPVTKSFNRGEX

SEQ ID NO: 814 - protein, 220 aa, Artificial Sequence
  Synthesized sequence with two or more selenocysteine residues substituted for two or more cysteine residues
  VARIANT (1)...(220): Xaa = selenocysteine or cysteine
QLVLTQSSSASFSLGASAKLTXTLSSQHSTFTIEWYQQQPLKPPKYVMDLKKDGSHSTGDGVPDRFSGSSSGADRYLSISNIQPEDEATYIXGVGDTIKEQFVYVFGGGTKVTVLGQPKSTPTLTVFPPSSEELKENKATLVXLISNFSPSGVTVAWKANGTPITQGVDTSNPTKEGNKFMASSFLHLTSDQWRSHNSFTXQVTHEGDTVEKSLSPAEXL

SEQ ID NO: 815 - protein, 221 aa, Artificial Sequence
  Synthesized sequence with two or more selenocysteine residues substituted for two or more cysteine residues
  VARIANT (1)...(221): Xaa = selenocysteine or cysteine
DIVMTQTPLSSPVTLGQPASISXRSSQSLVHSDGNTYLSWLQQRPGQPPRLLIYKISNRFSGVPDRFSGSGAGTDFTLKISRVEAEDVGVYYXMQATQFPHQWTFGQGTKVEIKRTVAAPSVFIFPPSDEQLKSGTASVVXLLNNFYPREAKVQWKVDNALQSGNSQESVTEQDSKDSTYSLSSTLTLSKADYEKHKVYAXEVTHQGLSSPVTKSFNRGEX

SEQ ID NO: 816 - protein, 216 aa, Artificial Sequence
  Synthesized sequence with two or more selenocysteine residues substituted for two or more cysteine residues
  VARIANT (1)...(216): Xaa = selenocysteine or cysteine
DIQMTQSPSSLSASVGDRVTITXRASQGIRNDLGWYQQKPGKAPKRLIYAASSLQSGVPSRFSGSGSGTEFTLTISSLQPEDFATYYXLQHNSYPPVYTFGQGTKLEIKRTVAAPSVFIFPPSDEQLKSGTASVVXLLNNFYPREAKVQWKVDNALQSGNSQESVTEQDSKDSTYSLSSTLTLSKADYEKHKVYAXEVTHQGLSSPVTKSFNRGEX

SEQ ID NO: 817 - protein, 212 aa, Artificial Sequence
  Synthesized sequence with two or more selenocysteine residues substituted for two or more cysteine residues
  VARIANT (1)...(212): Xaa = selenocysteine or cysteine
EIVLTQSPAIMSASPGEKVTMTXSASSSVSYMHWYQQKSGTSPKRWIYDSSRLASGVPSRFSGGGSGTSYSLTISNMEAEDAATYFXQNWRSSPTFGAGTKLELKRTVAAPSVFIFPPSDEQLKSGTASVVXLLNNFYPREAKVQWKVDNALQSGNSQESVTEQDSKDSTYSLSSTLTLSKADYEKHKVYAXEVTHQGLSSPVTKSFNRGEX

SEQ ID NO: 818 - protein, 213 aa, Artificial Sequence
  Synthesized sequence with two or more selenocysteine residues substituted for two or more cysteine residues
  VARIANT (1)...(213): Xaa = selenocysteine or cysteine
SYELTQPPSVSVAPGQTARISXSGDNIGGTFVSWYQQKPGQAPVLVIYDDNDRPSGIPERFSGSNSGNTATLTISGTQAEDEADYYXGTWDMVTNNVFGGGTKLTVLGQPKAAPSVTLFPPSSEELQANKATLVXLISDFYPGAVTVAWKADSSPVKAGVETTTPSKQSNNKYAASSYLSLTPEQWKSHRSYSXQVTHEGSTVEKTVAPTEXS

SEQ ID NO: 819 - protein, 234 aa, Artificial Sequence
  Synthesized sequence with two or more selenocysteine residues substituted for two or more cysteine residues
  VARIANT (1)...(234): Xaa = selenocysteine or cysteine
MRLPAQLLGLLLLWFPGSRXDIQMTQSPSSVSASVGDRVTITXRASQGIYSWLAWYQQKPGKAPNLLIYTASTLQSGVPSRFSGSGSGTDFTLTISSLQPEDFATYYXQQANIFPLTFGGGTKVEIKRTVAAPSVFIFPPSDEQLKSGTASVVXLLNNFYPREAKVQWKVDNALQSGNSQESVTEQDSKDSTYSLSSTLTLSKADYEKHKVYAXEVTHQGLSSPVTKSFNRGEX

SEQ ID NO: 820 - protein, 214 aa, Artificial Sequence
  Synthesized sequence with two or more selenocysteine residues substituted for two or more cysteine residues
  VARIANT (1)...(214): Xaa = selenocysteine or cysteine
DIQMTQSPSSVSASVGDRVTITXRASQGISSWLAWYQQKPGKAPKLLIYAASSLQSGVPSRFSGSGSGTDFTLTISSLQPEDFATYYXQQANSFPITFGQGTRLEIKRTVAAPSVFIFPPSDEQLKSGTASVVXLLNNFYPREAKVQWKVDNALQSGNSQESVTEQDSKDSTYSLSSTLTLSKADYEKHKVYAXEVTHQGLSSPVTKSFNRGEX

SEQ ID NO: 821 - protein, 215 aa, Artificial Sequence
  Synthesized sequence with two or more selenocysteine residues substituted for two or more cysteine residues
  VARIANT (1)...(215): Xaa = selenocysteine or cysteine
DIVLTQSPATLSLSPGERATLSXRASQYGSSSYLAWYQQKPGQAPRLLIYDASNRATGVPARFSGSGSGTDFTLTISSLEPEDFAVYYXQQYSDWPFTFGQGTKVEIKRTVAAPSVFIFPPSNEQLKSGTASVVXLLNNFYPREAKVQWKVDNALQSGNSQESVTEQDSKDSTYSLSSYLTLSKADYEKHKVYAXEVTHQGLSSPVTKSFDRGEX

SEQ ID NO: 822 - protein, 214 aa, Artificial Sequence
  Synthesized sequence with two or more selenocysteine residues substituted for two or more cysteine residues
  VARIANT (1)...(214): Xaa = selenocysteine or cysteine
DIQMTQSPSSLSASVGDRVTITXSASQGISNYLNWYQQKPGKVPKLLIYYTSSLHSGVPSRFSGSGSGTDFTLTISSLQPEDVATYYXQQYLAFPYTFGQGTKLEIKRTVAAPSVFIFPPSDEQLKSGTASVVXLLNNFYPREAKVQWKVDNALQSGNSQESVTEQDSKDSTYSLSSTLTLSKADYEKHKVYAXEVTHQGLSSPVTKSFNRGEX

SEQ ID NO: 823 - protein, 215 aa, Artificial Sequence
  Synthesized sequence with two or more selenocysteine residues substituted for two or more cysteine residues
  VARIANT (1)...(215): Xaa = selenocysteine or cysteine
DIQMTQSPASLSASVGETVTITXRASGNIHNYLAWYQQKQGKSPQLLVYNAKTLADGVPSRFSGSESGTQYSLKINSLQPEDFGSYYXQHFWSTPFTFGSGTKLELKRGTVAAPSVFIFPPSDEQLKSGTASVVXLLNNFYPREAKVQWKVDNALQSGNSQESVTEQDSKDSTYSLSSTLTLSKADYEKHKVYAXEVTHQGLSSPVTKSFNRGEX

SEQ ID NO: 824 - protein, 214 aa, Artificial Sequence
  Synthesized sequence with two or more selenocysteine residues substituted for two or more cysteine residues
  VARIANT (1)...(214): Xaa = selenocysteine or cysteine
DIQMTQSPSSLSASVGDRVTITXKASQDIKSFLSWYQQKPEKAPKSLIYYATSLADGVPSRFSGSGSGTDYTLTISSLQPEDFATYYXLQHGESPYTFGGGTKVEIKRTVAAPSVFIFPPSDEQLKSGTASVVXLLNNFYPREAKVQWKVDNALQSGNSQESVTEQDSKDSTYSLSSTLTLSKADYEKHKVYAXEVTHQGLSSPVTKSFNRGEX

SEQ ID NO: 825 - protein, 220 aa, Artificial Sequence
  Synthesized sequence with two or more selenocysteine residues substituted for two or more cysteine residues
  VARIANT (1)...(220): Xaa = selenocysteine or cysteine
DVVMTQTPLSLPVTPGEPASISXRSSQSLVHRNGNTYLHWYLQKPGQSPKLLIHKVSNRFSGVPDRFSGSGSGTDFTLKISRVEAEDLGVYFXSQSTHVPPLTFGAGTKLELKRTVAAPSVFIFPPSDEQLKSGTASVVXLLNNFYPREAKVQWKVDNALQSGNSQESVTEQDSKDSTYSLSSTLTLSKADYEKHKVYAXEVTHQGLSSPVTKSFNRGEX

SEQ ID NO: 826 - protein, 219 aa, Artificial Sequence
  Synthesized sequence with two or more selenocysteine residues substituted for two or more cysteine residues
  VARIANT (1)...(219): Xaa = selenocysteine or cysteine
DIVMTQSPLSLPVTPGEPASISXRSSQNIVHINGNTYLEWYLQKPGQSPRLLIYKISDRFSGVPDRFSGSGSGTDFTLKISRVEADDVGVYYXFQGSHVPWTFGQGTKLEIKRTVAAPSVFIFPPSDEQLKSGTASVVXLLNNFYPREAKVQWKVDNALQSGNSQESVTEQDSKDSTYSLSSTLTLSKADYEKHKVYAXEVTHQGLSSPVTKSFNRGEX

SEQ ID NO: 827 - protein, 217 aa, Artificial Sequence
  Synthesized sequence with two or more selenocysteine residues substituted for two or more cysteine residues
  VARIANT (1)...(217): Xaa = selenocysteine or cysteine
DIVLTQSPASLAVSLGQRATISXKASQSVDYDGDNYMNWYQQTSGQPPKFLISGASNLESGIPARFSGSGSGTDFTLNIHPVEEEDAATYYXQQSNEDPWTFGGGTKLEIKRVAAPSVFIFPPSDEQLKSGTASVVXLLNNFYPREAKVQWKVDNALQSGNSQESVTEQDSKDSTYSLSSTLTLSKADYEKHKVYAXEVTHQGLSSPVTKSFNRGEX

SEQ ID NO: 828 - protein, 219 aa, Artificial Sequence
  Synthesized sequence with two or more selenocysteine residues substituted for two or more cysteine residues
  VARIANT (1)...(219): Xaa = selenocysteine or cysteine
DIQMTQSPSSLSASVGDRVTITXRSSQSIVHSNGNTYLEWYQQKPGKAPKLLIYKVSNRFSGVPSRFSGSGSGTDFTLTISSLQPEDFATYYXFQGSHIPYTFGGGTKVEIKRTVAAPSVFIFPPSDEQLKSGTASVVXLLNNFYPREAKVQWKVDNALQSGNSQESVTEQDSKDSTYSLSSTLTLSKADYEKHKVYAXEVTHQGLSSPVTKSFNRGEX

SEQ ID NO: 829 - protein, 214 aa, Artificial Sequence
  Synthesized sequence with two or more selenocysteine residues substituted for two or more cysteine residues
  VARIANT (1)...(214): Xaa = selenocysteine or cysteine
EIVLTQSPGTLSLSLGERATLSXRASQSISSSFLAWYQQKPGQAPKLLIYAASTRATGIPDRFSGSGSGTDFTLTISRLEPEDFAVYYXQQYGRSLSFGGGTKVEVKRTVAAPSVFIFPPSDEQLKSGTASVVXLLNNFYPREAKVQWKVDNALQSGNSQESVTEQDSKDSTYSLSSTLTLSKADYEKHKVYAXEVTHQGLSSPVTKSFNRGEX

SEQ ID NO: 830 - protein, 219 aa, Artificial Sequence
  Synthesized sequence with two or more selenocysteine residues substituted for two or more cysteine residues
  VARIANT (1)...(219): Xaa = selenocysteine or cysteine
DVVMTQSPLSLPVTPGEPASISXRSSQSLLHSNGNNYLDWYLQKPGQSPQLLIYLGSNRASGVPDRFSGSGSDTDFTLQISRVEAEDVGVYYXMQGTHPAISFGQGTRLEIKRTVAAPSVFIFPPSDEQLKSGTASVVXLLNNFYPREAKVQWKVDNALQSGNSQESVTEQDSKDSTYSLSSTLTLSKADYEKHKVYAXEVTHQGLSSPVTKSFNRGEX

SEQ ID NO: 831 - protein, 213 aa, Artificial Sequence
  Synthesized sequence with two or more selenocysteine residues substituted for two or more cysteine residues
  VARIANT (1)...(213): Xaa = selenocysteine or cysteine
DIQLTQSPSSLSASVGDRVTITXKASQDVGTSVAWYQQKPGKAPKLLIYWTSTRHTGVPSRFSGSGSGTDFTFTISSLQPEDIATYYXQQYSLYRSFGQGTKVEIKRTVAAPSVFIFPPSDEQLKSGTASVVXLLNNFYPREAKVQWKVDNALQSGNSQESVTEQDSKDSTYSLSSTLTLSKADYEKHKVYAXEVTHQGLSSPVTKSFNRGEX

SEQ ID NO: 832 - protein, 214 aa, Artificial Sequence
  Synthesized sequence with two or more selenocysteine residues substituted for two or more cysteine residues
  VARIANT (1)...(214): Xaa = selenocysteine or cysteine
AIRMTQSPSSFSASTGDRVTITXRASQDIRNYVAWYQQKSGKAPKFLIYAASTLQSGVPSRFSGSGSGTDFTLTINSLQSEDFATYYXQQYYNSPPTFGQGTRVEITRTVAAPSVFIFPPSDEQLKSGTASVVXLLNNFYPREAKVQWKVDNALQSGNSQESVTEQDSKDSTYSLSSTLTLSKADYEKHKVYAXEVTHQGLSSPVTKSFNRGEX

SEQ ID NO: 833 - protein, 215 aa, Artificial Sequence
  Synthesized sequence with two or more selenocysteine residues substituted for two or more cysteine residues
  VARIANT (1)...(215): Xaa = selenocysteine or cysteine
DIQMTQSPSSLSASVGDRVTITXSASSRVSSTYLFWYQQKPGKAPKLLIYRTSPLASGVPSRFSGSGSGTDFTLTISSLQPEDFATYYXQQWSGYPFVFGGGTKVEIKRTVAAPSVFIFPPSDEQLKSGTASVVXLLNNFYPREAKVQWKVDNALQSGNSQESVTEQDSKDSTYSLSSTLTLSKADYEKHKVYAXEVTHQGLSSPVTKSFNRGEX

SEQ ID NO: 834 - protein, 214 aa, Artificial Sequence
  Synthesized sequence with two or more selenocysteine residues substituted for two or more cysteine residues
  VARIANT (1)...(214): Xaa = selenocysteine or cysteine
DIQMTQSPSSLSASVGDRVTITXRASKSISKYTAWYQQKPGKAPKLLIYAGSKLHWGVPSRFSGSGSGTDFTLTISSLQPEDFATYYXQQHNEYPYTFGGGTKVEIKRTVAAPSVFIFPPSDEQLKSGTASVVXLLNNFYPREAKVQWKVDNALQSGNSQESVTEQDSKDSTYSLSSTLTLSKADYEKHKVYAXEVTHQGLSSPVTKSFNRGEX

SEQ ID NO: 835 - protein, 219 aa, Artificial Sequence
  Synthesized sequence with two or more selenocysteine residues substituted for two or more cysteine residues
  VARIANT (1)...(219): Xaa = selenocysteine or cysteine
DIVMTQSPLSLPVTPGEPASISXRSSKSLLHRNGITYSYWYLQKPGQSPQLLIYQLSNLASGVPDRFSGSGSGTDFTLKISRVEAEDVGVYYXYQNLELPLTFGQGTKVEIKRTVAAPSVFIFPPSDEQLKSGTASVVXLLNNFYPREAKVQWKVDNALQSGNSQESVTEQDSKDSTYSLSSTLTLSKADYEKHKVYAXEVTHQGLSSPVTKSFNRGEX

SEQ ID NO: 836 - protein, 214 aa, Artificial Sequence
  Synthesized sequence with two or more selenocysteine residues substituted for two or more cysteine residues
  VARIANT (1)...(214): Xaa = selenocysteine or cysteine
EIVLTQSPATLSLSPGERATLSXRASQSVRSYLAWYQQKPGQAPRLLIYDASNRATGIPARFSGSGSGTDFTLTISSLEPEDFAVYYXQQRSNWPPTFGQGTKVEIKRTVAAPSVFIFPPSDEQLKSGTASVVXLLNNFYPREAKVQWKVDNALQSGNSQESVTEQDSKDSTYSLSSTLTLSKADYEKHKVYAXEVTHQGLSSPVTKSFNRGEX

SEQ ID NO: 837 - protein, 214 aa, Artificial Sequence
  Synthesized sequence with two or more selenocysteine residues substituted for two or more cysteine residues
  VARIANT (1)...(214): Xaa = selenocysteine or cysteine
QSVLTQPPSLSVAPGKTATFTXGGNNIGDKSVHWYRQKPGQAPVLVMYLDTERPSGIPERMSGSNFGNTATLTITRVEAEDEADYYXQVWDSGSDHVVFGGGTKLTVLGQPKAAPSVTLFPPSSEELQANKATLVXLISDFYPGAVTVAWKADSSPVKAGVETTTPSKQSNNKYAASSYLSLTPEQWKSHRSYSXQVTHEGSTVEKTVAPAEXS

SEQ ID NO: 838 - protein, 214 aa, Artificial Sequence
  Synthesized sequence with two or more selenocysteine residues substituted for two or more cysteine residues
  VARIANT (1)...(214): Xaa = selenocysteine or cysteine
DIQMTQSPSSVSASVGDRVTITXKASQDVYIAVAWYQQKPGKAPKLLIYWASTRDTGVPSRFSGSGSGTDFTLTISSLQPEDFATYYXHQYSSYPPTFGGGTKVEIKRTVAAPSVFIFPPSDEQLKSGTASVVXLLNNFYPREAKVQWKVDNALQSGNSQESVTEQDSKDSTYSLSSTLTLSKADYEKHKVYAXEVTHQGLSSPVTKSFNRGEX

SEQ ID NO: 839 - protein, 213 aa, Artificial Sequence
  Synthesized sequence with two or more selenocysteine residues substituted for two or more cysteine residues
  VARIANT (1)...(213): Xaa = selenocysteine or cysteine
DIQMTQSPSSLSASVGDRVTITXRASQDISNYLNWYQQKPGKAPKLLIYYTSRLHSGVPSRFSGSGSGTDFTLTISSLQPEDFATYYXQQFHTLRTFGGGTKVEIKRTVAAPSVFIFPPSDEQLKSGTASVVXLLNNFYPREAKVQWKVDNALQSGNSQESVTEQDSKDSTYSLSSTLTLSKADYEKHKVYAXEVTHQGLSSPVTKSFNRGEX

SEQ ID NO: 840 - protein, 236 aa, Artificial Sequence
  Synthesized sequence with two or more selenocysteine residues substituted for two or more cysteine residues
  VARIANT (1)...(236): Xaa = selenocysteine or cysteine
MDMRVPAQLLGLLLLWFPGSRXDIQMTQSPSSVSASVGDRVTITXRASQGISSWLAWYQQKPGKAPKLLIYEASNLETGVPSRFSGSGSGSDFTLTISSLQPEDFATYYXQQTSSFLLSFGGGTKVEHKRTVAAPSVFIFPPSDEQLKSGTASVVXLLNNFYPREAKVQWKVDNALQSGNSQESVTEQDSKDSTYSLSSTLTLSKADYEKHKVYAXEVTHQGLSSPVTKSFNRGEX

SEQ ID NO: 841 - protein, 213 aa, Artificial Sequence
  Synthesized sequence with two or more selenocysteine residues substituted for two or more cysteine residues
  VARIANT (1)...(213): Xaa = selenocysteine or cysteine
DIQMTQSPSTLSASVGDRVTITXRASQGISSWLAWYQQKPGKAPKVLIYKASTLESGVPSRFSGSGSGTEFTLTISSLQPDDFATYYXQQSWLGGSFGQGTKLEIKRTVAAPSVFIFPPSDEQLKSGTASVVXLLNNFYPREAKVQWKVDNALQSGNSQESVTEQDSKDSTYSLSSTLTLSKADYEKHKVYAXEVTHQGLSSPVTKSFNRGEX

SEQ ID NO: 842 - protein, 219 aa, Artificial Sequence
  Synthesized sequence with two or more selenocysteine residues substituted for two or more cysteine residues
  VARIANT (1)...(219): Xaa = selenocysteine or cysteine
DIVMTQSPATLSLSPGERATLSXRSSKSLQNVNGNTYLYWFQQKPGQSPQLLIYRMSNLNSGVPDRFSGSGSGTEFTLTISSLEPEDFAVYYXMQHLEYPITFGAGTKLEIKRTVAAPSVFIFPPSDEQLKSGTASVVXLLNNFYPREAKVQWKVDNALQSGNSQESVTEQDSKDSTYSLSSTLTLSKADYEKHKVYAXEVTHQGLSSPVTKSFNRGEX

SEQ ID NO: 843 - protein, 214 aa, Artificial Sequence
  Synthesized sequence with two or more selenocysteine residues substituted for two or more cysteine residues
  VARIANT (1)...(214): Xaa = selenocysteine or cysteine
EIVLTQSPVTLSVSPGERVTLSXRASQSVSTNLAWYQQKLGQGPRLLIYGASTRATDIPARFSGSGSETEFTLTISSLQSEDFAVYYXQQYDKWPDTFGQGTKLEIKRTVAAPSVFIFPPSDEQLKSGTASVVXLLNNFYPREAKVQWKVDNALQSGNSQESVTEQDSKDSTYSLSSTLTLSKADYEKHKVYAXEVTHQGLSSPVTKSFNRGEX

SEQ ID NO: 844 - protein, 238 aa, Artificial Sequence
  Synthesized sequence with two or more selenocysteine residues substituted for two or more cysteine residues
  VARIANT (1)...(238): Xaa = selenocysteine or cysteine
MEKDTLLLWVLLLWVPGSTGDIVLTQSPASLAVSLGQRATISXRASESVDNYGISYMNWFQQKPGQPPKVLIYAASNQGSGVPARFSGSGSGTDFSLNIHPMEEDDTAMYFXQQSKEVPWTFGGGTKLEIKRTVAAPSVFIFPPSDEQLKSGTASVVXLLNNFYPREAKVQWKVAAALQSGNSQESVTEQDSKDSTYSLSSTLTLSKADYEKHKVYAXEVTHQGLSSPVTKSFNRGEX

SEQ ID NO: 845 - protein, 214 aa, Artificial Sequence
  Synthesized sequence with two or more selenocysteine residues substituted for two or more cysteine residues
  VARIANT (1)...(214): Xaa = selenocysteine or cysteine
DIQMTQSPSSLSASVGDRVTITXRASQGISSWLAWYQQKPEKAPKSLIYAASSLQSGVPSRFSGSGSGTDFTLTISSLQPEDFATYYXQQYKSYPRTFGQGTKVEIKRTVAAPSVFIFPPSDEQLKSGTASVVXLLNNFYPREAKVQWKVDNALQSGNSQESVTEQDSKDSTYSLSSTLTLSKADYEKHKVYAXEVTHQGLSSPVTKSFNRGEX

SEQ ID NO: 846 - protein, 219 aa, Artificial Sequence
  Synthesized sequence with two or more selenocysteine residues substituted for two or more cysteine residues
  VARIANT (1)...(219): Xaa = selenocysteine or cysteine
DVVMTQTPLSLPVTPGQPASISXRSSQSILHSNGNTYLEWYLQKPGQSPQLLIYKVSNRFSGVPDRFSGSGSGTDFTLKISRVEAEDVGVYYXLQTTRVPLTFGQGTKLEIKRTVAAPSVFIFPPSDEQLKSGTASVVXLLNNFYPREAKVQWKVDNALQSGNSQESVTEQDSKDSTYSLSSTLTLSKADYEKHKVYAXEVTHQGLSSPVTKSFNRGEX

SEQ ID NO: 847 - protein, 217 aa, Artificial Sequence
  Synthesized sequence with two or more selenocysteine residues substituted for two or more cysteine residues
  VARIANT (1)...(217): Xaa = selenocysteine or cysteine
QSVLTQPPSVSGAPGQRVTISXTGSSSNIGAGYDVHWYQQLPGTAPKLLIYGYSNRPSGVPDRFSGSKSGASASLAITGLRPDDEADYYXQSYDNSLSSYVFGGGTQLTVLSQPKANPTVTLFPPSSEELQANKATLVXLISDFYPGAVTVAWKADGSPVKAGVETTKPSKQSNNKYAASSYLSLTPEQWKSHRSYSXQVTHEGSTVEKTVAPTEXS

SEQ ID NO: 848 - protein, 238 aa, Artificial Sequence
  Synthesized sequence with two or more selenocysteine residues substituted for two or more cysteine residues
  VARIANT (1)...(238): Xaa = selenocysteine or cysteine
METDTILLWVLLLWVPGSTGDIVLTQSPASLAVSLGQRATISXKASQSVDYDGGSYMSWFQQRPGQPPKLLISAASNLESGIPARFSGSGSGTDFTLNIHPVEEEDVATYYXQQSYEDPLTFGAGTKLELKRADAAPTVSIFPPSSEQLTSGGASVVXFLNNFYPKDINVKWKIDGSERQNGVLNSWTDQDSKDSTYSMSSTLTLTKDEYERHNSYTXEATHKTSTSPIVKSFNRNEX

SEQ ID NO: 849 - protein, 234 aa, Artificial Sequence
  Synthesized sequence with two or more selenocysteine residues substituted for two or more cysteine residues
  VARIANT (1)...(234): Xaa = selenocysteine or cysteine
METPAQLLFLLLLWLPDTTGEIVMTQSPATLSVSPGERATLSXRASQSVRSNLAWYQQKPGQAPRLLIYGASTRATGIPARFSGSGSGTEFTLTISSLQSEDFAVYSXQQYNNWPWTFGQGTKVEIKRTVAAPSVFIFPPSDEQLKSGTASVVXLLNNFYPREAKVQWKVDNALQSGNSQESVTEQDSKDSTYSLSSTLTLSKADYEKHKVYAXEVTHQGLSSPVTKSFNRGEX

SEQ ID NO: 850 - protein, 213 aa, Artificial Sequence
  Synthesized sequence with two or more selenocysteine residues substituted for two or more cysteine residues
  VARIANT (1)...(213): Xaa = selenocysteine or cysteine
DIQMTQSPSSLSASVGDRVTITXKASQDVSTAVAWYQQKPGQAPRLLIYWASTRHTGVPSRFSGSGSGTDFTLTISSLQPEDFALYYXQQHYSTPWTFGQGTKLEIKRTVAAPSVFIFPPSDEQLKSGTASWXLLNNFYPREAKVQWKVDNALQSGNSQESVTEQDSKDSTYSLSSTLTLSKADYEKHKVYAXEVTHQGLSSPVTKSFNRGEX

SEQ ID NO: 851 - protein, 217 aa, Artificial Sequence
  Synthesized sequence with two or more selenocysteine residues substituted for two or more cysteine residues
  VARIANT (1)...(217): Xaa = selenocysteine or cysteine
DIVLTQSPATLSLSPGERATLSXRASESVEYYGTSLMQWYQQKPGQPPKLLIFGASNVESGVPDRFSGSGSGTDFTLKISRVEAEDVGMYFXQQSRKLPWTFGGGTKVEIKRTVAAPSVFIFPPSDEQLKSGTASWXLLNNFYPREAKVQWKVDNALQSGNSQESVTEQDSKDSTYSLSSTLTLSKADYEKHKVYAXEVTHQGLSSPVTKSFNRGEX

SEQ ID NO: 852 - protein, 215 aa, Artificial Sequence
  Synthesized sequence with two or more selenocysteine residues substituted for two or more cysteine residues
  VARIANT (1)...(215): Xaa = selenocysteine or cysteine
DIQMTQSPSSLSASVGDRVTITXKASQDVSTAVAWYQQKPGKAPKLLIYSASYRYTGVPDRFTGSGSGTDFTLTISSLQPEDFATYYXQQHYSTPPYTFGGGTKVEIKRTVAAPSVFIFPPSDEQLKSGTASVVXLLNNFYPREAKVQWKVDNALQSGNSQESVTEQDSKDSTYSLSSTLTLSKADYEKHKVYAXEVTHQGLSSPVTKSFNRGEX

SEQ ID NO: 853 - protein, 239 aa, Artificial Sequence
  Synthesized sequence with two or more selenocysteine residues substituted for two or more cysteine residues
  VARIANT (1)...(239): Xaa = selenocysteine or cysteine
MRLPAQLLGLLMLWIPGSSADIVMTQTPLSLSVTPGQPASISXKSSQSLLHTDGTTYLYWYLQKPGQPPQLLIYEVSNRFSGVPDRFSGSGSGTDFTLKISRVEAEDVGIYYXMQNIQLPWTFGQGTKVEIKRTVAAPSVFIFPPSDEQLKSGTASVVXLLNNFYPREAKVQWKVDNALQSGNSQESVTEQDSKDSTYSLSSTLTLSKADYEKHKVYAXEVTHQGLSSPVTKSFNRGEX

SEQ ID NO: 854 - protein, 215 aa, Artificial Sequence
  Synthesized sequence with two or more selenocysteine residues substituted for two or more cysteine residues
  VARIANT (1)...(215): Xaa = selenocysteine or cysteine
NFMLTQPHSVSESPGKTVTISXTRSSGSIDSSYVQWYQQRPGSSPTTVIYEDDQRPSGVPDRFSGSIDSSSNSASLTISGLKTEDEADYYXQSYDFHHLVFGGGTKLTVLQPKAAPSVTLFPPSSEELQANKATLVXLISDFYPGAVTVAWKADSSPVKAGVETTTPSKQSNNKYAASSYLSLTPEQWKSHRSYSXQVTHEGSTVEKTVAPTEXS

SEQ ID NO: 855 - protein, 214 aa, Artificial Sequence
  Synthesized sequence with two or more selenocysteine residues substituted for two or more cysteine residues
  VARIANT (1)...(214): Xaa = selenocysteine or cysteine
DIQMTQSPSSLSASVGDRVTITXRASEDIYNALAWYQQKPGKAPKLLIYNTDTLHTGVPSRFSGSGSGTDYTLTISSLQPEDFATYFXQHYFHYPRTFGQGTKVEIKRTVAAPSVFIFPPSDEQLKSGTASVVXLLNNFYPREAKVQWKVDNALQSGNSQESVTEQDSKDSTYSLSSTLTLSKADYEKHKVYAXEVTHQGLSSPVTKSFNRGEX

SEQ ID NO: 856 - protein, 214 aa, Artificial Sequence
  Synthesized sequence with two or more selenocysteine residues substituted for two or more cysteine residues
  VARIANT (1)...(214): Xaa = selenocysteine or cysteine
DIQMTQSPSSLSASVGDRVTITXRASQDVSTAVAWYQQKPGKAPKLLIYSASFLYSGVPSRFSGSGSGTDFTLTISSLQPEDFATYYXQQAYPALHTFGQGTKVEIKRTVAAPSVFIFPPSDEQLKSGTASVVXLLNNFYPREAKVQWKVDNALQSGNSQESVTEQDSKDSTYSLSSTLTLSKADYEKHKVYAXEVTHQGLSSPVTKSFNRGEX

SEQ ID NO: 857 - protein, 213 aa, Artificial Sequence
  Synthesized sequence with two or more selenocysteine residues substituted for two or more cysteine residues
  VARIANT (1)...(213): Xaa = selenocysteine or cysteine
DIQMTQSPSSLSASVGDRVTITXRTSENVYSNLAWYQQKPGKAPKLLIYAASNLQSGVPSRFSGSGSGTDYTFTISSLQPEDIATYYXQHFWGSPFTFGQGTKLEIKTVAAPSVFIFPPSDEQLKSGTASVVXLLNNFYPREAKVQWKVDNALQSGNSQESVTEQDSKDSTYSLSSTLTLSKADYEKHKVYAXEVTHQGLSSPVTKSFNRGEX

SEQ ID NO: 858 - protein, 238 aa, Artificial Sequence
  Synthesized sequence with two or more selenocysteine residues substituted for two or more cysteine residues
  VARIANT (1)...(238): Xaa = selenocysteine or cysteine
MGWSXIILFLVATATGVHSDVVMTQTPLSLSVTLGQPASISXKSSQSLIHSDGRTYLNWLLQRPGQSPKRLIYLVSRLDSGVPDRFTGSGAGTDFTLKISRVEAEDLGVYYXWQGSHFPRTFGGGTKLEIKRTVAAPSVFIFPPSDEQLKSGTASVVXLLNNFYPREAKVQWKVDNALQSGNSQESVTEQDSKDSTYSLSSTLTLSKADYEKHKVYAXEVTHQGLSSPVTKSFNRGEX

SEQ ID NO: 859 - protein, 212 aa, Artificial Sequence
  Synthesized sequence with two or more selenocysteine residues substituted for two or more cysteine residues
  VARIANT (1)...(212): Xaa = selenocysteine or cysteine
DIQLTQSPAIMSASPGEKVTMTXSASSSVSYIHWYQQKSGTSPKRWVYDTSKLASGVPARFSGSGSGTSYSLTISTMEAEDAATYYXQQWNNNPYSFGGGTKVVIKTVAAPSVFIFPPSDEQLKSGTASVVXLLNNFYPREAKVQWKVDNALQSGNSQESVTEQDSKDSTYSLSSTLTLSKADYEKHKVYAXEVTHQGLSSPVTKSFNRGEX

SEQ ID NO: 860 - protein, 234 aa, Artificial Sequence
  Synthesized sequence with two or more selenocysteine residues substituted for two or more cysteine residues
  VARIANT (1)...(234): Xaa = selenocysteine or cysteine
MEAPAQLLFLLLLWLPDTHGDIVMTQSPSSLSASVGDRVTITXKASENVVTYVSWYQQKPGKAPKLLIYGASNRYTGVPDRFSGSGSGTDFTLTISSLQPEDFATYYXGQGYSYPYTFGQGTKLEIKRTVAAPSVFIFPPSDEQLKSGTASVVXLLNNFYPREAKVQWKVDNALQSGNSQESVTEQDSKDSTYSLSSTLTLSKADYEKHKVYAXEVTHQGLSSPVTKSFNRGEX

SEQ ID NO: 861 - protein, 237 aa, Artificial Sequence
  Synthesized sequence with two or more selenocysteine residues substituted for two or more cysteine residues
  VARIANT (1)...(237): Xaa = selenocysteine or cysteine
METDTILLWVLLLWVPGSTGDIVMTQSPDSLAVSLGERATINXKASQSVDYDGDSYMNWYQQKPGQPPKLLIYVASNLESGVPQRFSGSGSGTDFTLTISSLQAEDVAVYYXQQSLQDPPTFGGGTKVEIKRTVAALSVFIFPPSDEQLKSGTASVVXLLNNFYPREAKVQWKVDNALQSGNSQESVTEQDSKDSTSLSSTLTLSKADYEKHKVYAXEVTHQGLSSPVTKSFNRGEX

SEQ ID NO: 862 - protein, 217 aa, Artificial Sequence
  Synthesized sequence with two or more selenocysteine residues substituted for two or more cysteine residues
  VARIANT (1)...(217): Xaa = selenocysteine or cysteine
QSVLTQPPSASGTPGQRVTISXSGSNSNIGSNTVNWYQQLPGTAPKLLIYSDSNRPSGVPDRFSGSKSGTSASLAISGLRSEDEADYYXQSYDSSLSGSRVFGGGTKLTVLGQPKANPTVTLFPPSSEELQANKATLVXLISDFYPGAVTVAWKADGSPVKAGVETTKPSKQSNNKYAASSYLSLTPEQWKSHRSYSXQVTHEGSTVEKTVAPTEXS

SEQ ID NO: 863 - protein, 237 aa, Artificial Sequence
  Synthesized sequence with two or more selenocysteine residues substituted for two or more cysteine residues
  VARIANT (1)...(237): Xaa = selenocysteine or cysteine
METDTILLWVLLLWVGSTGDIVLTQSPVSLAVSLGQRATISXKASQSVDYDGDSYMNWYQQKPGQPPKLLIYVASNLESGIPARFSGSGSGTDFTLNIHPVEEEDVATYYXQQSNEDPWTFGGGTKLEMKRADAAPTVSIFPPSSEQLTSGGASVVXFLNNFYPKDINVKWKIDGSERQNGVLNSWTDQDSKDSTYSMSSTLTLTKDEYERHNSYTXEATHKTSTSPIVKSFNRNEX

SEQ ID NO: 864 - protein, 214 aa, Artificial Sequence
  Synthesized sequence with two or more selenocysteine residues substituted for two or more cysteine residues
  VARIANT (1)...(214): Xaa = selenocysteine or cysteine
DIQMTQSPSSLSASIGDRVTISXRASQAINNYVAWFQQSAGKAPKSLIYGASNLQPGVPPRFSGSVSGTNFSLTIDGLQSEDFATYFXQNYFGYPLTFGGGTTLEIKRTVAAPSVFIFPPSDEQLKSGTASVVXLLNNFYPREAKVQWKVDNALQSGNSQESVTEQDSKDSTYSLSSTLTLSKADYEKHKVYAXEVTHQGLSSPVTKSFNRGEX

SEQ ID NO: 865 - protein, 217 aa, Artificial Sequence
  Synthesized sequence with two or more selenocysteine residues substituted for two or more cysteine residues
  VARIANT (1)...(217): Xaa = selenocysteine or cysteine
QSALTQPASASGSPGQSVTITXTGSSSDVGGYKYVSWYQHHPGKAPKLMIYEVSKRPSGVPDRFSGSKSGNMASLTVSGLQAEDEADYYXSSYAGSYNFYVFGNGTKVTVLGQPKANPTVTLFPPSSEELQANKATLVXLISDFYPGAVTVAWKADGSPVKAGVETTKPSKQSNNKYAASSYLSLTPEQWKSHRSYSXQVTHEGSTVEKTVAPTEXS

SEQ ID NO: 866 - protein, 215 aa, Artificial Sequence
  Synthesized sequence with two or more selenocysteine residues substituted for two or more cysteine residues
  VARIANT (1)...(215): Xaa = selenocysteine or cysteine
DIVLTQSPATLSLSPGERATLSXRASQFISSSYLSWYQQKPGQAPRLLIYGSSSRATGVPARFSGSGSGTDFTLTISSLEPEDFAVYYXQQLYSSPMTFGQGTKVEIKRTVAAPSVFIFPPSDEQLKSGTASVVXLLNNFYPREAKVQWKVDNALQSGNSQESVTEQDSKDSTYSLSSTLTLSKADYEKHKVYAXEVTHQGLSSPVTKSFNRGEX

SEQ ID NO: 867 - protein, 217 aa, Artificial Sequence
  Synthesized sequence with two or more selenocysteine residues substituted for two or more cysteine residues
  VARIANT (1)...(217): Xaa = selenocysteine or cysteine
SYELTQPPSSSGTPGQRVTISXSGSSSNIGRHTVSWYQQVPGTAPKLLIYSDDHRPSGVPDRFSASKSGTSASLTITGLQSEDEADYYXAAWDDSLNGPWVFGGGTKLTVLGQPKAAPSVTLFPPSSEELQANKATLVXLISDFYPGAVTVAWKADSSPVKAGVETTTPSKQSNNKYAASSYLSLTPEQWKSHRSYSXQVTHEGSTVEKTVAPTEXS

SEQ ID NO: 868 - protein, 214 aa, Artificial Sequence
  Synthesized sequence with two or more selenocysteine residues substituted for two or more cysteine residues
  VARIANT (1)...(214): Xaa = selenocysteine or cysteine
DIQMTQSPSSLSASVGDRVTITXKASQSVSNDVAWYQQKPGKAPKLLIYFATNRYTGVPSRFSGSGYGTDFTLTISSLQPEDFATYYXQQDYSSPWTFGQGTKVEIKRTVAAPSVFIFPPSDEQLKSGTASVVXLLNNFYPREAKVQWKVDNALQSGNSQESVTEQDSKDSTYSLSSTLTLSKADYEKHKVYAXEVTHQGLSSPVTKSFNRGEX

SEQ ID NO: 869 - protein, 214 aa, Artificial Sequence
  Synthesized sequence with two or more selenocysteine residues substituted for two or more cysteine residues
  VARIANT (1)...(214): Xaa = selenocysteine or cysteine
DIELTQSPASLSASVGETVTITXQASENIYSYLAWHQQKQGKSPQLLVYNAKTLAGGVSSRFSGSGSGTHFSLKIKSLQPEDFGIYYXQHHYGILPTFGGGTKLEIKRADAAPTVSIFPPSSEQLTSGGASVVXFLNNFYPKDINVKWKIDGSERQNGVLNSWTDQDSKDSTYSMSSTLTLTKDEYERHNSYTXEATHKTSTSPIVKSFNRNEX

SEQ ID NO: 870 - protein, 213 aa, Artificial Sequence
  Synthesized sequence with two or more selenocysteine residues substituted for two or more cysteine residues
  VARIANT (1)...(213): Xaa = selenocysteine or cysteine
DIQMTQSPSSLSASVGDRVTITXRASQDISNYIAWYQQKPGKAPKLLIYYTSKIHSGVPSRFSGSGSGTDYTFTISSLQPEDIATYYXQQGNTFPYTFGQGTKVEIKRTVAAPSVFIFPPSDEQLKSGTASWXLLNNFYPREAKVQWKVDNALQSGNSQESVTEQDSKDSTYSLSSTLTLSKADYEKHKVYAXEVTHQGLSSPVTKSFNRGEX

SEQ ID NO: 871 - protein, 214 aa, Artificial Sequence
  Synthesized sequence with two or more selenocysteine residues substituted for two or more cysteine residues
  VARIANT (1)...(214): Xaa = selenocysteine or cysteine
DIQMTQSPSSVSASVGDRVTITXRASQGISSWLAWYQQKPGKAPKLLIYGASNLESGVPSRFSGSGSGTDFTLTISSLQPEDFANYYXQQANSFPWTFGQGTKVEIKRTVAAPSVFIFPPSDEQLKSGTASVVXLLNNFYPREAKVQWKVDNALQSGNSQESVTEQDSKDSTYSLSSTLTLSKADYEKHKVYAXEVTHQGLSSPVTKSFNRGEX

SEQ ID NO: 872 - protein, 215 aa, Artificial Sequence
  Synthesized sequence with two or more selenocysteine residues substituted for two or more cysteine residues
  VARIANT (1)...(215): Xaa = selenocysteine or cysteine
EIVLTQSPGTLSLSPGERATLSXRASQSVSSSYLAWYQQKPGQAPRLLIYGASSRATGIPDRFSGSGSGTDFTLTISRLEPEDFAVYYXQQYGSSTWTFGQGTKVEIKRTVAAPSVFIFPPSDEQLKSGTASVVXLLNNFYPREAKVQWKVDNALQSGNSQESVTEQDSKDSTYSLSSTLTLSKADYEKHKVYAXEVTHQGLSSPVTKSFNRGEX

SEQ ID NO: 873 - protein, 214 aa, Artificial Sequence
  Synthesized sequence with two or more selenocysteine residues substituted for two or more cysteine residues
  VARIANT (1)...(214): Xaa = selenocysteine or cysteine
ELQMTQSPSSLSASVGDRVTITXRTSQSISSYLNWYQQKPGQPPKLLIYWASTRESGVPDRFSGSGSGTDFTLTISSLQPEDSATYYXQQSYDIPYTFGQGTKLEIKRTVAAPSVFIFPPSDEQLKSGTASVVXLLNNFYPREAKVQWKVDNALQSGNSQESVTEQDSKDSTYSLSSTLTLSKADYEKHKVYAXEVTHQGLSSPVTKSFNRGEX

SEQ ID NO: 874 - protein, 214 aa, Artificial Sequence
  Synthesized sequence with two or more selenocysteine residues substituted for two or more cysteine residues
  VARIANT (1)...(214): Xaa = selenocysteine or cysteine
DIQMTQSPSSLSASVGDRVTITXRASQSISSYLNWYQQKPGKAPKLLIYAASSLQSGVPSRFSGSGSGTDFTLTISSLQPEDFATYYXQQSYSTPLTFGGGTKVEIKRTVAAPSVFIFPPSDEQLKSGTASVVXLLNNFYPREAKVQWKVDNALQSGNSQESVTEQDSKDSTYSLSSTLTLSKADYEKHKVYAXEVTHQGLSSPVTKSFNRGEX

SEQ ID NO: 875 - protein, 215 aa, Artificial Sequence
  Synthesized sequence with two or more selenocysteine residues substituted for two or more cysteine residues
  VARIANT (1)...(215): Xaa = selenocysteine or cysteine
EIVLTQSPATLSLSPGERATLSXRASQSVRSYLAWYQQKPGQAPRLLIYDASNRATGIPARFSGSGSGTDFTLTISSLEPEDFAVYYXQQRSNWPPATFGGGTKVEIKRTVAAPSVFIFPPSDEQLKSGTASVVXLLNNFYPREAKVQWKVDNALQSGNSQESVTEQDSKDSTYSLSSTLTLSKADYEKHKVYAXEVTHQGLSSPVTKSFNRGEX

SEQ ID NO: 876 - protein, 214 aa, Artificial Sequence
  Synthesized sequence with two or more selenocysteine residues substituted for two or more cysteine residues
  VARIANT (1)...(214): Xaa = selenocysteine or cysteine
DIQMTQSPSSLSASVGDRVTITXRASQDIAGSLNWLQQKPGKAIKRLIYATSSLDSGVPKRFSGSRSGSDYTLTISSLQPEDFATYYXLQYGSFPPTFGQGTKVEIKRTVAAPSVFIFPPSDEQLKSGTASVVXLLNNFYPREAKVQWKVDNALQSGNSQESVTEQDSKDSTYSLSSTLTLSKADYEKHKVYAXEVTHQGLSSPVTKSFNRGEX

SEQ ID NO: 877 - protein, 214 aa, Artificial Sequence
  Synthesized sequence with two or more selenocysteine residues substituted for two or more cysteine residues
  VARIANT (1)...(214): Xaa = selenocysteine or cysteine
DIQMTQSPSSLSASVGDRVTITXKASQNIDKYLNWYQQKPGKAPKLLIYNTNNLQTGVPSRFSGSGSGTDFTFTISSLQPEDIATYYXLQHISRPRTFGQGTKVEIKRTVAAPSVFIFPPSDEQLKSGTASVVXLLNNFYPREAKVQWKVDNALQSGNSQESVTEQDSKDSTYSLSSTLTLSKADYEKHKVYAXEVTHQGLSSPVTKSFNRGEX

SEQ ID NO: 878 - protein, 220 aa, Artificial Sequence
  Synthesized sequence with two or more selenocysteine residues substituted for two or more cysteine residues
  VARIANT (1)...(220): Xaa = selenocysteine or cysteine
DIVMTQSPDSLAVSLGERATINXKSSQSVLYRSNNRNFLGWYQQKPGQPPNLLIYWASTRESGVPDRFSGSGSGTDFTLTISSLQAEDVAVYYXQQYYTTPYTFGQGTKLEIKRTVAAPSVFIFPPSDEQLKSGTASVVXLLNNFYPREAKVQWKVDNALQSGNSQESVTEQDSKDSTYSLSSTLTLSKADYEKHKVYAXEVTHQGLSSPVTKSFNRGEX

SEQ ID NO: 879 - protein, 213 aa, Artificial Sequence
  Synthesized sequence with two or more selenocysteine residues substituted for two or more cysteine residues
  VARIANT (1)...(213): Xaa = selenocysteine or cysteine
DIELTQSPAIMSASPGEKVTMTXSASSSVSYMHWYQQKSGTSPKRWIYDTSKLASGVPGRFSGSGSGNSYSLTISSVEAEDDATYYXQQWSKHPLTFGSGTKVEIKRTVAAPSVFIFPPSDEQLKSGTASVVXLLNNFYPREAKVQWKVDNALQSGNSQESVTEQDSKDSTYSLSSTLTLSKADYEKHKVYAXEVTHQGLSSPVTKSFNRGEX

SEQ ID NO: 880 - protein, 214 aa, Artificial Sequence
  Synthesized sequence with two or more selenocysteine residues substituted for two or more cysteine residues
  VARIANT (1)...(214): Xaa = selenocysteine or cysteine
DIQMTQSPSSLSASVGDRVTITXKASQDVRNTVAWYQQKPGKAPKLLIYSSSYRNTGVPDRFSGSGSGTDFTLTISSLQAEDVAVYYXQQHYITPYTFGGGTKVEIKRTVAAPSVFIFPPSDEQLKSGTASVVXLLNNFYPREAKVQWKVDNALQSGNSQESVTEQDSKDSTYSLSSTLTLSKADYEKHKVYAXEVTHQGLSSPVTKSFNRGEX

SEQ ID NO: 881 - protein, 217 aa, Artificial Sequence
  Synthesized sequence with two or more selenocysteine residues substituted for two or more cysteine residues
  VARIANT (1)...(217): Xaa = selenocysteine or cysteine
DIALTQPASVSGSPGQSITISXTGTSSDIGGYNSVSWYQQHPGKAPKLMIYGVNNRPSGVSNRFSGSKSGNTASLTISGLQAEDEADYYXSSYDIESATPVFGGGTKLTVLGQPKAAPSVTLFPPSSEELQANKATLVXLISDFYPGAVTVAWKGDSSPVKAGVETTTPSKQSNNKYAASSYLSLTPEQWKSHRSYSXQVTHEGSTVEKTVAPTEXS

SEQ ID NO: 882 - protein, 215 aa, Artificial Sequence
  Synthesized sequence with two or more selenocysteine residues substituted for two or more cysteine residues
  VARIANT (1)...(215): Xaa = selenocysteine or cysteine
EIVLTQSPGTLSLSPGERATLSXRASQSVSSSFFAWYQQKPGQAPRLLIYGASSRATGIPDRLSGSGSGTDFTLTITRLEPEDFAVYYXQQYDSSAITFGQGTRLEIKRTVAAPSVFIFPPSDEQLKSGTASVVXLLNNFYPREAKVQWKVDNALQSGNSQESVTEQDSKDSTYSLSSTLTLSKADYEKHKVYAXEVTHQGLSSPVTKSFNRGEX

SEQ ID NO: 883 - protein, 218 aa, Artificial Sequence
  Synthesized sequence with two or more selenocysteine residues substituted for two or more cysteine residues
  VARIANT (1)...(218): Xaa = selenocysteine or cysteine
DIQMTQSPSSLSASVGDRVTITXKASESVDNYGKSLMHWYQQKPGKAPKLLIYRASNLESGVPSRFSGSGSGTDFTLTISSLQPEDFATYYXQQSNEDPWTFGGGTKVEIKRTVAAPSVFIFPPSDEQLKSGTASVVXLLNNFYPREAKVQWKVDNALQSGNSQESVTEQDSKDSTYSLSSTLTLSKADYEKHKVYAXEVTHQGLSSPVTKSFNRGEX

SEQ ID NO: 884 - protein, 216 aa, Artificial Sequence
  Synthesized sequence with two or more selenocysteine residues substituted for two or more cysteine residues
  VARIANT (1)...(216): Xaa = selenocysteine or cysteine
QSVLTQPPSASGTPGQRVTISXSGSSSNIGNNYVSWYQQLPGTAPKLLIYENYNRPAGVPDRFSGSKSGTSASLAISGLRSEDEADYYXSSWDDSLNYWVFGGGTKLTVLGQPKAAPSVTLFPPSSEELQANKATLVXLISDFYPGAVTVAWKADSSPVKAGVETTTPSKQSNNKYAASSYLSLTPEQWKSHRSYSXQVTHEGSTVEKTVAPTEXS

SEQ ID NO: 885 - protein, 215 aa, Artificial Sequence
  Synthesized sequence with two or more selenocysteine residues substituted for two or more cysteine residues
  VARIANT (1)...(215): Xaa = selenocysteine or cysteine
EIVLTQSPGTLSLSPGERATLSXRASQSVSSSYLAWYQQKPGQAPRLLIYGTSSRATGIPDRFSGSGSGTDFTLTISRLEPEDFAVYYXQQYGSSPITFGQGTRLEIKRTVAAPSVFIFPPSDEQLKSGTASVVXLLNNFYPREAKVQWKVDNALQSGNSQESVTEQDSKDSTYSLSSTLTLSKADYEKHKVYAXEVTHQGLSSPVTKSFNRGEX

SEQ ID NO: 886 - protein, 214 aa, Artificial Sequence
  Synthesized sequence with two or more selenocysteine residues substituted for two or more cysteine residues
  VARIANT (1)...(214): Xaa = selenocysteine or cysteine
DIQMTQSPSSLSASVGDRVTITXRASQDVSTAVAWYQQKPGKAPKLLIYSASFLYSGVPSRFSGSGSGTDFTLTISSLQPEDFATYYXQQYLYHPATFGQGTKVEIKRTVAAPSVFIFPPSDEQLKSGTASVVXLLNNFYPREAKVQWKVDNALQSGNSQESVTEQDSKDSTYSLSSTLTLSKADYEKHKVYAXEVTHQGLSSPVTKSFNRGEX

SEQ ID NO: 887 - protein, 214 aa, Artificial Sequence
  Synthesized sequence with two or more selenocysteine residues substituted for two or more cysteine residues
  VARIANT (1)...(214): Xaa = selenocysteine or cysteine
EIVLTQSPATLSLSPGERATLSXRASQSVSSYLAWYQQKPGQAPRLLIYDASNRATGIPARFSGSGSGTDFTLTISSLEPEDFAVYYXQQRSNWPITFGQGTKLEIKRTVAAPSVFIFPPSDEQLKSGTASVVXLLNNFYPREAKVQWKVDNALQSGNSQESVTEQDSKDSTYSLSSTLTLSKADYEKHKVYAXEVTHQGLSSPVTKSFNRGEX

SEQ ID NO: 888 - protein, 216 aa, Artificial Sequence
  Synthesized sequence with two or more selenocysteine residues substituted for two or more cysteine residues
  VARIANT (1)...(216): Xaa = selenocysteine or cysteine
QSALTQPASVSGSPGQSITISXTGTSSDVGGYNYVSWYQQHPGKAPKLMIYDVSNRPSGVSNRFSGSKSGNTASLTISGLQAEDEADYYXSSYTSSSTRVFGTGTKVTVLGQPKANPTVTLFPPSSEELQANKATLVXLISDFYPGAVTVAWKADGSPVKAGVETTKPSKQSNNKYAASSYLSLTPEQWKSHRSYSXQVTHEGSTVEKTVAPTEXS

SEQ ID NO: 889 - protein, 241 aa, Artificial Sequence
  Synthesized sequence with two or more selenocysteine residues substituted for two or more cysteine residues
  VARIANT (1)...(241): Xaa = selenocysteine or cysteine
MDMRVPAQLLGLLMLWVSGSSGDVVMTQSPLSLPVTPGEPASISXKSSQSLLDSDGKTYLNWLLQKPGQSPQRLIYLVSKLDSGVPDRFSGSGSGTDFTLKISRVEAEDVGVYYXWQGTHFPRTFGQGTKVEIKRTVAAPSVFIFPPSDEQLKSGTASVVXLLNNFYPREAKVQWKVDNALQSGNSQESVTEQDSKDSTYSLSSTLTLSKADYEKHKVYAXEVTHQGLSSPVTKSFNRGEX

SEQ ID NO: 890 - protein, 214 aa, Artificial Sequence
  Synthesized sequence with two or more selenocysteine residues substituted for two or more cysteine residues
  VARIANT (1)...(214): Xaa = selenocysteine or cysteine
DIQMTQSPSSLSASLGERVSLTXRASQDIGSSLNWLQQGPDGTIKRLIYATSSLDSGVPKRFSGSRSGSDYSLTISSLESEDFVDYYXLQYVSSPPTFGAGTKLELKRADAAPSVFIFPPSDEQLKSGTASVVXLLNNFYPREAKVQWKVDNALQSGNSQESVTEQDSKDSTYSLSSTLTLSKADYEKHKVYAXEVTHQGLSSPVTKSFNRGEX

SEQ ID NO: 891 - protein, 213 aa, Artificial Sequence
  Synthesized sequence with two or more selenocysteine residues substituted for two or more cysteine residues
  VARIANT (1)...(213): Xaa = selenocysteine or cysteine
QIVLTQSPAIMSASPGEKVTITXSASSSVSYMNWFQQKPGTSPKLWIYSTSNLASGVPARFSGSGSGTSYSLTISRMEAEDAATYYXQQRSSYPNTFGGGTKLEIKRADAAPTVSIFPPSSEQLTSGGASVVXFLNNFYPKDINVKWKIDGSERQNGVLNSWTDQDSKDSTYSMSSTLTLTKDEYERHNSYTXEATHKTSTSPIVKSFNRNEX

SEQ ID NO: 892 - protein, 214 aa, Artificial Sequence
  Synthesized sequence with two or more selenocysteine residues substituted for two or more cysteine residues
  VARIANT (1)...(214): Xaa = selenocysteine or cysteine
DIQMTQSPSSLSASVGDRVTITXGTSEDIINYLNWYQQKPGKAPKLLIYHTSRLQSGVPSRFSGSGSGTDFTLTISSLQPEDFATYYXQQGYTLPYTFGQGTKVEIKRTVAAPSVFIFPPSDEQLKSGTASVVXLLNNFYPREAKVQWKVDNALQSGNSQESVTEQDSKDSTYSLSSTLTLSKADYEKHKVYAXEVTHQGLSSPVTKSFNRGEX

SEQ ID NO: 893 - protein, 214 aa, Artificial Sequence
  Synthesized sequence with two or more selenocysteine residues substituted for two or more cysteine residues
  VARIANT (1)...(214): Xaa = selenocysteine or cysteine
DIQMTQSPSSLSASVGDRVTITXSASQDISNYLNWYQQKPGKAPKVLIYFTSSLHSGVPSRFSGSGSGTDFTLTISSLQPEDFATYYXQQYSTVPWTFGQGTKVEIKRTVAAPSVFIFPPSDEQLKSGTASVVXLLNNFYPREAKVQWKVDNALQSGNSQESVTEQDSKDSTYSLSSTLTLSKADYEKHKVYAXEVTHQGLSSPVTKSFNRGEX

SEQ ID NO: 894 - protein, 215 aa, Artificial Sequence; identical to SEQ ID NO: 872
  Synthesized sequence with two or more selenocysteine residues substituted for two or more cysteine residues
  VARIANT (1)...(215): Xaa = selenocysteine or cysteine

SEQ ID NO: 895 - protein, 217 aa, Artificial Sequence
  Synthesized sequence with two or more selenocysteine residues substituted for two or more cysteine residues
  VARIANT (1)...(217): Xaa = selenocysteine or cysteine
QSALTQPASVSGSPGQSITISXTGTSSDVGSYNYVNWYQQHPGKAPKLMIYGVSKRPSGVSNRFSGSKSGNTASLTISGLQAEDEADYYXGTFAGGSYYGVFGGGTKLTVLGQPKAAPSVTLFPPSSEELQANKATLVXLISDFYPGAVTVAWKADSSPVKAGVETTTPSKQSNNKYAASSYLSLTPEQWKSHRSYSXQVTHEGSTVEKTVAPTEXS

SEQ ID NO: 896 - protein, 214 aa, Artificial Sequence
  Synthesized sequence with two or more selenocysteine residues substituted for two or more cysteine residues
  VARIANT (1)...(214): Xaa = selenocysteine or cysteine
AIQLTQSPSSLSASVGDRVTITXRADESVTTLMHWYQQKPGKAPKLLIYLVSNRESGVPSRFSGSGSGTDFTLTISSLQPEDFATYYXQQTWSDPWTFGQGTKVEIKRTVAAPSVFIFPPSDEQLKSGTASVVXLLNNFYPREAKVQWKVDNALQSGNSQESVTEQDSKDSTYSLSSTLTLSKADYEKHKVYAXEVTHQGLSSPVTKSFNRGEX

SEQ ID NO: 897 - protein, 213 aa, Artificial Sequence
  Synthesized sequence with two or more selenocysteine residues substituted for two or more cysteine residues
  VARIANT (1)...(213): Xaa = selenocysteine or cysteine
EIVLTQSPATLSLSPGERATLSXSASSSINYIYWYQQKPGQAPRLLIYLTSNLASGVPARFSGSGSGTDFTLTISSLEPEDFAVYYXLQWSSNPLTFGGGTKVEIKRTVAAPSVFIFPPSDEQLKSGTASVVXLLNNFYPREAKVQWKVDNALQSGNSQESVTEQDSKDSTYSLSSTLTLSKADYEKHKVYAXEVTHQGLSSPVTKSFNRGEX

SEQ ID NO: 898 - protein, 213 aa, Artificial Sequence
  Synthesized sequence with two or more selenocysteine residues substituted for two or more cysteine residues
  VARIANT (1)...(213): Xaa = selenocysteine or cysteine
AIQLTQSPSSLSASVGDRVTITXRASQGISSALAWYQQKPGKAPKLLIYDASNLESGVPSRFSGSGSGTDFTLTISSLQPEDFATYYXQQFNSYPTFGQGTKVEIKRTVAAPSVFIFPPSDEQLKSGTASVVXLLNNFYPREAKVQWKVDNALQSGNSQESVTEQDSKDSTYSLSSTLTLSKADYEKHKVYAXEVTHQGLSSPVTKSFNRGEX

SEQ ID NO: 899 - protein, 214 aa, Artificial Sequence
  Synthesized sequence with two or more selenocysteine residues substituted for two or more cysteine residues
  VARIANT (1)...(214): Xaa = selenocysteine or cysteine
DIQMTQSPSSLSASVGDRVTITXKASQDVHTAVAWYQQKPGKAPKLLIYWASTRWTGVPSRFSGSGSGTDFTLTISSLQPEDFATYYXQQYSDYPWTFGGGTKVEIKRTVAAPSVFIFPPSDEQLKSGTASVVXLLNNFYPREAKVQWKVDNALQSGNSQESVTEQDSKDSTYSLSSTLTLSKADYEKHKVYAXEVTHQGLSSPVTKSFNRGEX

SEQ ID NO: 900 - protein, 214 aa, Artificial Sequence
  Synthesized sequence with two or more selenocysteine residues substituted for two or more cysteine residues
  VARIANT (1)...(214): Xaa = selenocysteine or cysteine
DIQMTQSPSSLSASVGDRVTITXRASQGISSALAWYQQKPGKAPKLLIYSASYRYTGVPSRFSGSGSGTDFTFTISSLQPEDIATYYXQQRYSLWRTFGQGTKLEIKRTVAAPSVFIFPPSDEQLKSGTASVVXLLNNFYPREAKVQWKVDNALQSGNSQESVTEQDSKDSTYSLSSTLTLSKADYEKHKVYAXEVTHQGLSSPVTKSFNRGEX

SEQ ID NO: 901 - protein, 217 aa, Artificial Sequence
  Synthesized sequence with two or more selenocysteine residues substituted for two or more cysteine residues
  VARIANT (1)...(217): Xaa = selenocysteine or cysteine
QSVLTQPPSVSGAPGQRVTISXTGSSSNTGAGYDVHWYQQVPGTAPKLLIYGSGNRPSGVPDRFSGSKSGTSASLAITGLQAEDEADYYXQSYDSSLSGWVFGGGTRLTVLGQPKAAPSVTLFPPSSEELQANKATLVXLISDFYPGAVTVAWKADSSPVKAGVETTTPSKQSNNKYAASSYLSLTPEQWKSHRSYSXQVTHEGSTVEKTVAPTEXS

SEQ ID NO: 902 - protein, 218 aa, Artificial Sequence
  Synthesized sequence with two or more selenocysteine residues substituted for two or more cysteine residues
  VARIANT (1)...(218): Xaa = selenocysteine or cysteine
DIVLTQSPASLAVSLGQRATISXKASQSVDFDGDSYMNWYQQKPGQPPKVLIYAASNLESGIPARFSGSGSGTDFTLNIHPVEEEDAATYYXQQSNEDPWTFGGGTKLEIKRTVAAPSVFIFPPSDEQLKSGTASVVXLLNNFYPREAKVQWKVDNALQSGNSQESVTEQDSKDSTYSLSSTLTLSKADYEKHKVYAXEVTHQGLSSPVTKSFNRGEX

SEQ ID NO: 903 - protein, 217 aa, Artificial Sequence
  Synthesized sequence with two or more selenocysteine residues substituted for two or more cysteine residues
  VARIANT (1)...(217): Xaa = selenocysteine or cysteine
QSVLTQPPSVSGAPGQRVTISXSGSRSNIGSNTVKWYQQLPGTAPKLLIYYNDQRPSGVPDRFSGSKSGTSASLAITGLQAEDEADYYXQSYDRYTHPALLFGTGTKVTVLGQPKAAPSVTLFPPSSEELQANKATLVXLISDFYPGAVTVAWKADSSPVKAGVETTTPSKQSNNKYAASSYLSLTPEQWKSHRSYSXQVTHEGSTVEKTVAPTEXS

SEQ ID NO: 904 - protein, 214 aa, Artificial Sequence
  Synthesized sequence with two or more selenocysteine residues substituted for two or more cysteine residues
  VARIANT (1)...(214): Xaa = selenocysteine or cysteine
EIVMTQSPATLSVSPGERATLSXRASQSVSSNLAWFQQKPGQAPRPLIYDASTRATGVPARFSGSGSGTDFTLTISSLQSEDFAVYYXQQYDNWPLTFGGGTKVEIKRTVAAPSVFIFPPSDEQLKSGTASVVXLLNNFYPREAKVQWKVDNALQSGNSQESVTEQDSKDSTYSLSSTLTLSKADYEKHKVYAXEVTHQGLSSPVTKSFNRGEX

SEQ ID NO: 905 - protein, 213 aa, Artificial Sequence
  Synthesized sequence with two or more selenocysteine residues substituted for two or more cysteine residues
  VARIANT (1)...(213): Xaa = selenocysteine or cysteine
AIQLTQSPSSLSASVGDRVTITXRASQGISSALVWYQQKPGKAPKLLIYDASSLESGVPSRFSGSGSGTDFTLTISSLQPEDFATYYXQQFNDYFTFGPGTKVDIKRTVAAPSVFIFPPSDEQLKSGTASVVXLLNNFYPREAKVQWKVDNALQSGNSQESVTEQDSKDSTYSLSSTLTLSKADYEKHKVYAXEVTHQGLSSPVTKSFNRGEX

SEQ ID NO: 906 - protein, 218 aa, Artificial Sequence
  Synthesized sequence with two or more selenocysteine residues substituted for two or more cysteine residues
  VARIANT (1)...(218): Xaa = selenocysteine or cysteine
EIVLTQSPATLSLSPGERATLSXKASQSVDYDGDNYMNWYQQKPGQAPRLLIYAASNLESGIPARFSGSGSGTDFTLTISSLEPEDFAVYYXHLSNEDLSTFGGGTKVEIKRTVAAPSVFIFPPSDEQLKSGTASVVXLLNNFYPREAKVQWKVDNALQSGNSQESVTEQDSKDSTYSLSSTLTLSKADYEKHKVYAXEVTHQGLSSPVTKSFNRGEX

SEQ ID NO: 907 - protein, 214 aa, Artificial Sequence
  Synthesized sequence with two or more selenocysteine residues substituted for two or more cysteine residues
  VARIANT (1)...(214): Xaa = selenocysteine or cysteine
DIQMTQSPSSLSASVGDRVTITXLASQTIGTWLTWYQQKPGKAPKLLIYTATSLADGVPSRFSGSGSGTDFTLTISSLQPEDFATYYXQQVYSIPWTFGGGTKVEIKRTVAAPSVFIFPPSDEQLKSGTASVVXLLNNFYPREAKVQWKVDNALQSGNSQESVTEQDSKDSTYSLSSTLTLSKADYEKHKVYAXEVTHQGLSSPVTKSFNRGEX

SEQ ID NO: 908 - protein, 219 aa, Artificial Sequence
  Synthesized sequence with two or more selenocysteine residues substituted for two or more cysteine residues
  VARIANT (1)...(219): Xaa = selenocysteine or cysteine
DIVMTQSPLSVPVTPGEPVSISXRSSKSLLHSNGNTYLYWFLQRPGQSPQLLIYRMSNLVSGVPDRFSGSGSGTAFTLRISRVEAEDVGVYYXLQHLEYPFTFGPGTKLELKRTVAAPSVFIFPPSDEQLKSGTASVVXLLNNFYPREAKVQWKVDNALQSGNSQESVTEQDSKDSTYSLSSTLTLSKADYEKHKVYAXEVTHQGLSSPVTKSFNRGEX

SEQ ID NO: 909 - protein, 216 aa, Artificial Sequence
  Synthesized sequence with two or more selenocysteine residues substituted for two or more cysteine residues
  VARIANT (1)...(216): Xaa = selenocysteine or cysteine
EIVLTQSPATLSLSPGERATLSXRASQSVSDAYLAWYQQKPGQAPRLLIYDASSRATGVPARFSGSGSGTDFTLTISSLEPEDFAVYYXHQYIQLHSFTFGQGTKVEIKRTVAAPSVFIFPPSDEQLKSGTASVVXLLNNFYPREAKVQWKVDNALQSGNSQESVTEQDSKDSTYSLSSTLTLSKADYEKHKVYAXEVTHQGLSSPVTKSFNRGEX

SEQ ID NO: 910 - protein, 213 aa, Artificial Sequence
  Synthesized sequence with two or more selenocysteine residues substituted for two or more cysteine residues
  VARIANT (1)...(213): Xaa = selenocysteine or cysteine
QIVLSQSPAILSASPGEKVTMTXRASSSVSYMHWYQQKPGSSPKPWIYATSNLASGVPVRFSGSGSGTSYSLTISRVEAEDAATYYXQQWSSNPLTFGAGTKLELKRTVAAPSVFIFPPSDEQLKSGTASVVXLLNNFYPREAKVQWKVDNALQSGNSQESVTEQDSKDSTYSLSSTLTLSKADYEKHKVYAXEVTHQGLSSPVTKSFNRGEX

SEQ ID NO: 911 - protein, 215 aa, Artificial Sequence
  Synthesized sequence with two or more selenocysteine residues substituted for two or more cysteine residues
  VARIANT (1)...(215): Xaa = selenocysteine or cysteine
DIQMTQSPSSLSASVGDRVTITXKASAAVGTYVAWYQQKPGKAPKLLIYSASYRKRGVPSRFSGSGSGTDFTLTISSLQPEDFATYYXHQYYTYPLFTFGQGTKLEIKRTVAAPSVFIFPPSDEQLKSGTASVVXLLNNFYPREAKVQWKVDNALQSGNSQESVTEQDSKDSTYSLSSTLTLSKADYEKHKVYAXEVTHQGLSSPVTKSFNRGEX

SEQ ID NO: 912 - protein, 214 aa, Artificial Sequence
  Synthesized sequence with two or more selenocysteine residues substituted for two or more cysteine residues
  VARIANT (1)...(214): Xaa = selenocysteine or cysteine
SSELTQDPAVSVALGQTVRITXQGDSLRSYYATWYQQKPGQAPILVIYGENKRPSGIPDRFSGSSSGNTASLTITGAQAEDEADYYXKSRDGSGQHLVFGGGTKLTVLGQPKAAPSVTLFPPSSEELQANKATLVXLISDFYPGAVTVAWKADSSPVKAGVETTTPSKQSNNKYAASSYLSLTPEQWKSHRSYSXQVTHEGSTVEKTVAPAEXS

SEQ ID NO: 913 - protein, 217 aa, Artificial Sequence
  Synthesized sequence with two or more selenocysteine residues substituted for two or more cysteine residues
  VARIANT (1)...(217): Xaa = selenocysteine or cysteine
AIQMTQSPSSLSASVGDRVTITXQASQSINNELSWYQQKPGKAPKLLIYRASTLASGVPSRFSGSGSGTDFTLTISSLQPDDFATYYXQQGYSLRNIDNAFGGGTKVEIKRTVAAPSVFIFPPSDEQLKSGTASVVXLLNNFYPREAKVQWKVDNALQSGNSQESVTEQDSKDSTYSLSSTLTLSKADYEKHKVYAXEVTHQGLSSPVTKSFNRGEX

SEQ ID NO: 914 - protein, 215 aa, Artificial Sequence
  Synthesized sequence with two or more selenocysteine residues substituted for two or more cysteine residues
  VARIANT (1)...(215): Xaa = selenocysteine or cysteine
DIQLTQSPSSLSASVGDRVTMTXSASSSVSSSYLYWYQQKPGKAPKLWIYSTSNLASGVPARFSGSGSGTDFTLTISSLQPEDSASYFXHQWNRYPYTFGGGTRLEIKRTVAAPSVFIFPPSDEQLKSGTASVVXLLNNFYPREAKVQWKVDNALQSGNSQESVTEQDSKDSTYSLSSTLTLSKADYEKHKVYAXEVTHQGLSSPVTKSFNRGEX

SEQ ID NO: 915 - protein, 219 aa, Artificial Sequence
  Synthesized sequence with two or more selenocysteine residues substituted for two or more cysteine residues
  VARIANT (1)...(219): Xaa = selenocysteine or cysteine
DVVMTQSPLSLPVTPGEPASISXRSSQSLVHSNRNTYLHWYLQKPGQSPQLLIYKVSNRFSGVPDRFSGSGSGTDFTLKISRVEAEDVGVYYXSQNTHVPPTFGQGTKLEIKRTVAAPSVFIFPPSDEQLKSGTASVVXLLNNFYPREAKVQWKVDNALQSGNSQESVTEQDSKDSTYSLSSTLTLSKADYEKHKVYAXEVTHQGLSSPVTKSFNRGEX

SEQ ID NO: 916 - protein, 211 aa, Artificial Sequence
  Synthesized sequence with two or more selenocysteine residues substituted for two or more cysteine residues
  VARIANT (1)...(211): Xaa = selenocysteine or cysteine
EIVLTQSPAIMSASPGERVTMTXSASSGVNYMHWYQQKPGTSPRRWIYDTSKLASGVPARFSGSGSGTDYSLTISSMEPEDAATYYXHQRGSYTFGGGTKLEIKRTVAAPSVFIFPPSDEQLKSGTASVVXLLNNFYPREAKVQWKVDNALQSGNSQESVTEQDSKDSTYSLSSTLTLSKADYEKHKVYAXEVTHQGLSSPVTKSFNRGEX

SEQ ID NO: 917 - protein, 215 aa, Artificial Sequence
  Synthesized sequence with two or more selenocysteine residues substituted for two or more cysteine residues
  VARIANT (1)...(215): Xaa = selenocysteine or cysteine
EIVLTQSPGTLSLSPGERATLSXRASQGISRSYLAWYQQKPGQAPSLLIYGASSRATGIPDRFSGSGSGTDFTLTISRLEPEDFAVYYXQQFGSSPWTFGQGTKVEIKRTVAAPSVFIFPPSDEQLKSGTASVVXLLNNFYPREAKVQWKVDNALQSGNSQESVTEQDSKDSTYSLSSTLTLSKADYEKHKVYAXEVTHQGLSSPVTKSFNRGEX

SEQ ID NO: 918 - protein, 219 aa, Artificial Sequence
  Synthesized sequence with two or more selenocysteine residues substituted for two or more cysteine residues
  VARIANT (1)...(219): Xaa = selenocysteine or cysteine
DIVMTQTPLSLSVTPGQPASISXKSSQSLLESDGKTYLNWYLQKPGQSPQLLIYLVSILDSGVPDRFSGSGSGTDFTLKISRVEAEDVGVYYXLQATHFPQTFGGGTKVEIKRTVAAPSVFIFPPSDEQLKSGTASVVXLLNNFYPREAKVQWKVDNALQSGNSQESVTEQDSKDSTYSLSSTLTLSKADYEKHKVYAXEVTHQGLSSPVTKSFNRGEX

SEQ ID NO: 919 - protein, 219 aa, Artificial Sequence
  Synthesized sequence with two or more selenocysteine residues substituted for two or more cysteine residues
  VARIANT (1)...(219): Xaa = selenocysteine or cysteine
DIVMTQSPLSLPVTPGEPASISXRSSQSLVYSNGDTYLHWYLQKPGQSPQLLIYKVSNRFSGVPDRFSGSGSGTDFTLKISRVEAEDVGVYYXSQSTHVPWTFGQGTKVEIKRTVAAPSVFIFPPSDEQLKSGTASVVXLLNNFYPREAKVQWKVDNALQSGNSQESVTEQDSKDSTYSLSSTLTLSKADYEKHKVYAXEVTHQGLSSPVTKSFNRGEX

SEQ ID NO: 920 - protein, 218 aa, Artificial Sequence
  Synthesized sequence with two or more selenocysteine residues substituted for two or more cysteine residues
  VARIANT (1)...(218): Xaa = selenocysteine or cysteine
DIQMTQSPSSLSASVGDRVTITXKASQSVDYDGHSYMNWYQQKPGKAPKLLIYAASNLESGVPSRFSGSGSGTDFTLTISSLQPEDFATYYXQQSDENPLTFGGGTKVEIKRTVAAPSVFIFPPSDEQLKSGTASVVXLLNNFYPREAKVQWKVDNALQSGNSQESVTEQDSKDSTYSLSSTLTLSKADYEKHKVYAXEVTHQGLSSPVTKSFNRGEX

SEQ ID NO: 921 - protein, 214 aa, Artificial Sequence
  Synthesized sequence with two or more selenocysteine residues substituted for two or more cysteine residues
  VARIANT (1)...(214): Xaa = selenocysteine or cysteine
DIQMTQSPSSLSASVGDRVTITXRASQGIRNDLGWYQQKPGKAPKRLIYAASSLQSGVPSRFSGSGSGTEFILTVSSLQPEDFATYYXLQYNSNPFTFGPGTKVDIKRTVAAPSVFIFPPSDEQLKSGTASVVXLLNNFYPREAKVQWKVDNALQSGNSQESVTEQDSKDSTYSLSSTLTLSKADYEKHKVYAXEVTHQGLSSPVTKSFNRGEX

SEQ ID NO: 922 - protein, 219 aa, Artificial Sequence
  Synthesized sequence with two or more selenocysteine residues substituted for two or more cysteine residues
  VARIANT (1)...(219): Xaa = selenocysteine or cysteine
DIQMTQSPSSLSASVGDRVTITXRSSQSLVHSNGNTFLHWYQQKPGKAPKLLIYTVSNRFSGVPSRFSGSGSGTDFTLTISSLQPEDFATYFXSQTTHVPWTFGQGTKVEIKRTVAAPSVFIFPPSDEQLKSGTASVVXLLNNFYPREAKVQWKVDNALQSGNSQESVTEQDSKDSTYSLSSTLTLSKADYEKHKVYAXEVTHQGLSSPVTKSFNRGEX

SEQ ID NO: 923 - protein, 213 aa, Artificial Sequence
  Synthesized sequence with two or more selenocysteine residues substituted for two or more cysteine residues
  VARIANT (1)...(213): Xaa = selenocysteine or cysteine
DIQMTQSPSTLSASVGDRVTITXSASSSISYMHWYQQKPGKAPKLLIYTTSNLASGVPARFSGSGSGTEFTLTISSLQPDDFATYYXHQRSTYPLTFGQGTKVEVKRTVAAPSVFIFPPSDEQLKSGTASVVXLLNNFYPREAKVQWKVDNALQSGNSQESVTEQDSKDSTYSLSSTLTLSKADYEKHKVYAXEVTHQGLSSPVTKSFNRGEX

SEQ ID NO: 924 - protein, 219 aa, Artificial Sequence
  Synthesized sequence with two or more selenocysteine residues substituted for two or more cysteine residues
  VARIANT (1)...(219): Xaa = selenocysteine or cysteine
DIVMTQSPLSLPVTPGQPASISXRSSQSIVHSNGNTWLQWWLQKPGQSPQLLIWKVSNRLWGVPDRFSGSGSGTDFTLKISRVQAQDVGVWWXFQGSHVPWTFGQGTKVQIKRTVAAPSVFIFPPSDEQLKSGTASVVXLLNNFYPREAKVQWKVDNALQSGNSQESVTEQDSKDSTYSLSSTLTLSKADYEKHKVYAXEVTHQGLSSPVTKSFNRGEX

SEQ ID NO: 925 - protein, 214 aa, Artificial Sequence
  Synthesized sequence with two or more selenocysteine residues substituted for two or more cysteine residues
  VARIANT (1)...(214): Xaa = selenocysteine or cysteine
EIVLTQSPATLSLSPGERATLSXRASQSVSSYLAWYQQKPGQAPRLLIYDASNRATGIPARFSGSGSGTDFTLTISSLEPEDFAVYYXQQRSNWPPTFGQGTKVEIKRTVAAPSVFIFPPSDEQLKSGTASVVXLLNNFYPREAKVQWKVDNALQSGNSQESVTEQDSKDSTYSLSSTLTLSKADYEKHKVYAXEVTHQGLSSPVTKSFNRGEX

SEQ ID NO: 926 - protein, 216 aa, Artificial Sequence
  Synthesized sequence with two or more selenocysteine residues substituted for two or more cysteine residues
  VARIANT (1)...(216): Xaa = selenocysteine or cysteine
EIVLTQSPATLSLSPGERAILSXRAGQSVSSYLVWYQQKPGQAPRLLIYDASNRATGIPARFSGSGSGTDFTLTISSLEPEDFAVYYXQQRSSWPPVYTFGQGTKLEIKRTVAAPSVFIFPPSDEQLKSGTASVVXLLNNFYPREAKVQWKVDNALQSGNSQESVTEQDSKDSTYSLSSTLTLSKADYEKHKVYAXEVTHQGLSSPVTKSFNRGEX

SEQ ID NO: 927 - protein, 218 aa, Artificial Sequence
  Synthesized sequence with two or more selenocysteine residues substituted for two or more cysteine residues
  VARIANT (1)...(218): Xaa = selenocysteine or cysteine
DIVMTQSPDSLAVSLGERATISXRASESVDNYGISFMKWFQQKPGQPPKLLIYAASNQGSGVPDRFSGSGSGTDFTLTISSLQAEDVAVYYXQQSKEVPWTFGGGTKVEIKRTVAAPSVFIFPPSDEQLKSGTASVVXLLNNFYPREAKVQWKVDNALQSGNSQESVTEQDSKDSTYSLSSTLTLSKADYEKHKVYAXEVTHQGLSSPVTKSFNRGEX

SEQ ID NO: 928 - protein, 213 aa, Artificial Sequence
  Synthesized sequence with two or more selenocysteine residues substituted for two or more cysteine residues
  VARIANT (1)...(213): Xaa = selenocysteine or cysteine
EIVLTQSPATLSLSPGERATLSXSASSSVSYMHWYQQKPGQAPRLLIYDTSKLASGIPARFSGSGSGTDFTLTISSLEPEDVAVYYXFQGSVYPFTFGQGTKLEIKRTVAAPSVFIFPPSDEQLKSGTASVVXLLNNFYPREAKVQWKVDNALQSGNSQESVTEQDSKDSTYSLSSTLTLSKADYEKHKVYAXEVTHQGLSSPVTKSFNRGEX

SEQ ID NO: 929 - protein, 214 aa, Artificial Sequence
  Synthesized sequence with two or more selenocysteine residues substituted for two or more cysteine residues
  VARIANT (1)...(214): Xaa = selenocysteine or cysteine
DILMTQSPSSMSVSLGDTVSITXHSSQDINSNIGWLQQKPGKSFKGLIYHGTNLDDEVPSRFSGSGSGADYSLTISSLESEDFADYYXVQYAQFPWTFGGGTKLEIKRADAAPTVSIFPPSSEQLTSGGASVVXFLNNFYPKDINVKWKIDGSERQNGVLNSWTDQDSKDSTYSMSSTLTLTKDEYERHNSYTXEATHKTSTSPIVKSFNRNEX

SEQ ID NO: 930 - protein, 215 aa, Artificial Sequence
  Synthesized sequence with two or more selenocysteine residues substituted for two or more cysteine residues
  VARIANT (1)...(215): Xaa = selenocysteine or cysteine
ENVLTQSPAIMSASPGEKVTMTXRASSSVSSSYLHWYQQKSGASPKLWIYSTSNLASGVPARFSGSGSGTSYSLTISSVEAEDAATYYXQQYSGYPLTFGGGTKLEIKRTVAAPSVFIFPPSDEQLKSGTASVVXLLNNFYPREAKVQWKVDNALQSGNSQESVTEQDSKDSTYSLSSTLTLSKADYEKHKVYAXEVTHQGLSSPVTKSFNRGEX

SEQ ID NO: 931 - protein, 214 aa, Artificial Sequence
  Synthesized sequence with two or more selenocysteine residues substituted for two or more cysteine residues
  VARIANT (1)...(214): Xaa = selenocysteine or cysteine
DIQMTQSPSSLSASVGDRVTITXRASENIYSYLAWYQQKPGKAPKLLIHNAKTLAEGVPSRFSGSGSGTDFTLTISSLQPEDFATYYXQHHYGAPLTFGQGTKLEIKRTVAAPSVFIFPPSDEQLKSGTASVVXLLNNFYPREAKVQWKVDNALQSGNSQESVTEQDSKDSTYSLSSTLTLSKADYEKHKVYAXEVTHQGLSSPVTKSFNRGEX

SEQ ID NO: 932 - protein, 220 aa, Artificial Sequence
  Synthesized sequence with two or more selenocysteine residues substituted for two or more cysteine residues
  VARIANT (1)...(220): Xaa = selenocysteine or cysteine
EIVMTQSPATLSVSPGERATLSXRSSQSLVHRNGNTYLHWYLQKPGQSPKLLIHKVSNRFSGVPDRFSGSGSGTDFTLKISRVEAEDLGVYFXSQSTHVPPLTFGAGTKLELKRTVAAPSVFIFPPSDEQLKSGTASVVXLLNNFYPREAKVQWKVDNALQSGNSQESVTEQDSKDSTYSLSSTLTLSKADYEKHKVYAXEVTHQGLSSPVTKSFNRGEX

SEQ ID NO: 933 - protein, 214 aa, Artificial Sequence
  Synthesized sequence with two or more selenocysteine residues substituted for two or more cysteine residues
  VARIANT (1)...(214): Xaa = selenocysteine or cysteine
DIQMTQSPSSLSASVGDRVTITXKASQDVSTAVAWYQQKPGKAPKLLIYSASYRYTGVPSRFSGSGSGTDFTLTISSLQPEDFATYYXQQHYSTPWTFGGGTKVEIKRTVAAPSVFIFPPSDEQLKSGTASVVXLLNNFYPREAKVQWKVDNALQSGNSQESVTEQDSKDSTYSLSSTLTLSKADYEKHKVYAXEVTHQGLSSPVTKSFNRGEX

SEQ ID NO: 934 - protein, 213 aa, Artificial Sequence
  Synthesized sequence with two or more selenocysteine residues substituted for two or more cysteine residues
  VARIANT (1)...(213): Xaa = selenocysteine or cysteine
SELTQDPAVSVALGQTVRITXSGDSLRSYYASWYQQKPGQAPVLVIYGANNRPSGIPDRFSGSSSGNTASLTITGAQAEDEADYYXNSADSSGNHVVFGGGTKLTVLGQPKAAPSVTLFPPSSEELQANKATLVXLISDFYPGAVTVAWKADSSPVKAGVETTTPSKQSNNKYAASSYLSLTPEQWKSHKSYSXQVTHEGSTVEKTVAPTEXS

SEQ ID NO: 935 - protein, 214 aa, Artificial Sequence
  Synthesized sequence with two or more selenocysteine residues substituted for two or more cysteine residues
  VARIANT (1)...(214): Xaa = selenocysteine or cysteine
DIQMTQSPSSLSASVGDRVTITXRASQNIATDVAWYQQKPGKAPKLLIYSASFLYSGVPSRFSGSGSGTDFTLTISSLQPEDFATYYXQQSEPEPYTFGQGTKVEIKRTVAAPSVFIFPPSDEQLKSGTASVVXLLNNFYPREAKVQWKVDNALQSGNSQESVTEQDSKDSTYSLSSTLTLSKADYEKHKVYAXEVTHQGLSSPVTKSFNRGEX

SEQ ID NO: 936 - protein, 219 aa, Artificial Sequence
  Synthesized sequence with two or more selenocysteine residues substituted for two or more cysteine residues
  VARIANT (1)...(219): Xaa = selenocysteine or cysteine
DIVMTQSPLSLPVTPGEPASISXRSSQSLLYSIGYNYLDWYLQKSGQSPQLLIYLGSNRASGVPDRFSGSGSGTDFTLKISRVEAEDVGFYYXMQALQTPYTFGQGTKLEIKRTVAAPSVFIFPPSDEQLKSGTASVVXLLNNFYPREAKVQWKVDNALQSGNSQESVTEQDSKDSTYSLSSTLTLSKADYEKHKVYAXEVTHQGLSSPVTKSFNRGEX

SEQ ID NO: 937 - protein, 215 aa, Artificial Sequence
  Synthesized sequence with two or more selenocysteine residues substituted for two or more cysteine residues
  VARIANT (1)...(215): Xaa = selenocysteine or cysteine
EIVLTQSPGTLSLSPGERATLSXRASQRVSSSYLAWYQQKPGQAPRLLIYDASSRATGIPDRFSGSGSGTDFTLTISRLEPEDFAVYYXQQYGSLPWTFGQGTKVEIKRTVAAPSVFIFPPSDEQLKSGTASVVXLLNNFYPREAKVQWKVDNALQSGNSQESVTEQDSKDSTYSLSSTLTLSKADYEKHKVYAXEVTHQGLSSPVTKSFNRGEX

SEQ ID NO: 938 - protein, 217 aa, Artificial Sequence
  Synthesized sequence with two or more selenocysteine residues substituted for two or more cysteine residues
  VARIANT (1)...(217): Xaa = selenocysteine or cysteine
QSVLTQPPSVSAAPGQKVTISXSGSSSNIENNHVSWYQQLPGTAPKLLIYDNNKRPSGIPDRFSGSKSGTSATLGITGLQTGDEADYYXETWDTSLSAGRVFGGGTKLTVLGQPKAAPSVTLFPPSSEELQANKATLVXLISDFYPGAVTVAWKADSSPVKAGVETTTPSKQSNNKYAASSYLSLTPEQWKSHRSYSXQVTHEGSTVEKTVAPTEXS

SEQ ID NO: 939 - protein, 214 aa, Artificial Sequence
  Synthesized sequence with two or more selenocysteine residues substituted for two or more cysteine residues
  VARIANT (1)...(214): Xaa = selenocysteine or cysteine
DIQMTQSPSSLSASVGDRVTITXGASENIYGALNWYQQKPGKAPKLLIYGATNLADGVPSRFSGSGSGTDFTLTISSLQPEDFATYYXQNVLNTPLTFGQGTKVEIKRTVAAPSVFIFPPSDEQLKSGTASVVXLLNNFYPREAKVQWKVDNALQSGNSQESVTEQDSKDSTYSLSSTLTLSKADYEKHKVYAXEVTHQGLSSPVTKSFNRGEX

SEQ ID NO: 940 - protein, 216 aa, Artificial Sequence
  Synthesized sequence with two or more selenocysteine residues substituted for two or more cysteine residues
  VARIANT (1)...(216): Xaa = selenocysteine or cysteine
EIVLTQSPGTLSLSPGERATLSXRASQSVSSSYLAWYQQKPGQAPRLLIYGASSRATGIPDRFSGSGSGTDFTLTISRLEPEDFAVYYXQQYGSSPIFTFGPGTKVDIKRTVAAPSVFIFPPSDEQLKSGTASVVXLLNNFYPREAKVQWKVDNALQSGNSQESVTEQDSKDSTYSLSSTLTLSKADYEKHKVYAXEVTHQGLSSPVTKSFNRGEX

SEQ ID NO: 941 - protein, 215 aa, Artificial Sequence
  Synthesized sequence with two or more selenocysteine residues substituted for two or more cysteine residues
  VARIANT (1)...(215): Xaa = selenocysteine or cysteine
QSALTQPRSVSGSPGQSVTISXTGTSSSVGDSIYVSWYQQHPGKAPKLMLYDVTKRPSGVPDRFSGSKSGNTASLTISGLQAEDEADYYXYSYAGTDTLFGGGTKVTVLGQPKAAPSVTLFPPSSEELQANKATLVXLISDFYPGAVTVAWKADSSPVKAGVETTTPSKQSNNKYAASSYLSLTPEQWKSHRSYSXQVTHEGSTVEKTVAPTEXS

SEQ ID NO: 942 - protein, 214 aa, Artificial Sequence
  Synthesized sequence with two or more selenocysteine residues substituted for two or more cysteine residues
  VARIANT (1)...(214): Xaa = selenocysteine or cysteine
DIQMTQSPSSLSASVGDRVTITXRASQGISNWLAWYQQKPGKAPKLLIYGASSLQSGVPSRFSGSGSGTDFTLTISSLQPEDFATYYXQQYSSFPTTFGQGTKVEIKRTVAAPSVFIFPPSDEQLKSGTASVVXLLNNFYPREAKVQWKVDNALQSGNSQESVTEQDSKDSTYSLSSTLTLSKADYEKHKVYAXEVTHQGLSSPVTKSFNRGEX

SEQ ID NO: 943 - protein, 214 aa, Artificial Sequence
  Synthesized sequence with two or more selenocysteine residues substituted for two or more cysteine residues
  VARIANT (1)...(214): Xaa = selenocysteine or cysteine
DIQMTQSPSSLSASVGDRVTITXKASQDVGIAVAWYQQKPGKVPKLLIYWASTRHTGVPDRFSGSGSGTDFTLTISSLQPEDVATYYXQQYSSYPYTFGQGTKVEIKRTVAAPSVFIFPPSDEQLKSGTASVVXLLNNFYPREAKVQWKVDNALQSGNSQESVTEQDSKDSTYSLSSTLTLSKADYEKHKVYAXEVTHQGLSSPVTKSFNRGEX

SEQ ID NO: 944 - protein, 213 aa, Artificial Sequence
  Synthesized sequence with two or more selenocysteine residues substituted for two or more cysteine residues
  VARIANT (1)...(213): Xaa = selenocysteine or cysteine
DIQMTQSPSSLSASVGDRVTITXRASEDVNTYVSWYQQKPGKAPKLLIYAASNRYTGVPSRFSGSGSGTDFTLTISSLQPEDFATYYXQQSFSYPTFGQGTKLEIKRTVAAPSVFIFPPSDEQLKSGTASVVXLLNNFYPREAKVQWKVDNALQSGNSQESVTEQDSKDSTYSLSSTLTLSKADYEKHKVYAXEVTHQGLSSPVTKSFNRGEX

SEQ ID NO: 945 - protein, 215 aa, Artificial Sequence
  Synthesized sequence with two or more selenocysteine residues substituted for two or more cysteine residues
  VARIANT (1)...(215): Xaa = selenocysteine or cysteine
DIQMTQSPSSLSASVGDRVTITXSVSSSVSSIYLHWYQQKPGKAPKLLIYSTSNLASGVPSRFSGSGSGTDFTLTISSLQPEDFATYYXQVYSGYPLTFGGGTKVEIKRTVAAPSVFIFPPSDEQLKSGTASVVXLLNNFYPREAKVQWKVDNALQSGNSQESVTEQDSKDSTYSLSSTLTLSKADYEKHKVYAXEVTHQGLSSPVTKSFNRGEX

SEQ ID NO: 946 - protein, 214 aa, Artificial Sequence
  Synthesized sequence with two or more selenocysteine residues substituted for two or more cysteine residues
  VARIANT (1)...(214): Xaa = selenocysteine or cysteine
DIQMTQSPSSLSASVGDRVTITXKASRNIERQLAWYQQKPGQAPELLIYQASRKESGVPDRFSGSRYGTDFTLTISSLQPEDIATYYXQQYSDPPLTFGGGTKVEIKRTVAAPSVFIFPPSDEQLKSGTASVVXLLNNFYPREAKVQWKVDNALQSGNSQESVTEQDSKDSTYSLSSTLTLSKADYEKHKVYAXEVTHQGLSSPVTKSFNRGEX

SEQ ID NO: 947 - protein, 218 aa, Artificial Sequence
  Synthesized sequence with two or more selenocysteine residues substituted for two or more cysteine residues
  VARIANT (1)...(218): Xaa = selenocysteine or cysteine
DIQMTQSPSSLSASVGDRVTITXRASQSVSTSSYSYMHWYQQKPGKAPKLLIKYASNLESGVPSRFSGSGSGTDFTLTISSLQPEDFATYYXQHSWEIPYTFGGGTKVEIKRTVAAPSVFIFPPSDEQLKSGTASVVXLLNNFYPREAKVQWKVDNALQSGNSQESVTEQDSKDSTYSLSSTLTLSKADYEKHKVYAXEVTHQGLSSPVTKSFNRGEX

SEQ ID NO: 948 - protein, 214 aa, Artificial Sequence
  Synthesized sequence with two or more selenocysteine residues substituted for two or more cysteine residues
  VARIANT (1)...(214): Xaa = selenocysteine or cysteine
DIQMTQSPSSVSASVGDRVTITXRASQGISGWLAWYQQKPGKAPKFLIYAASTLQSGVPSRFSGSGSGTDFTLTISSLQPEDFATYYXQQANSFPPTFGGGTKVEIKRTVAAPSVFIFPPSDEQLKSGTASVVXLLNNFYPREAKVQWKVDNALQSGNSQESVTEQDSKDSTYSLSSTLTLSKADYEKHKVYAXEVTHQGLSSPVTKSFNRGEX

SEQ ID NO: 949 - protein, 216 aa, Artificial Sequence
  Synthesized sequence with two or more selenocysteine residues substituted for two or more cysteine residues
  VARIANT (1)...(216): Xaa = selenocysteine or cysteine
DIVLTQPPSVSGAPGQRVTISXSGSSSNIGSNSVSWYQQLPGTAPKLLIYDNSKRPSGVPDRFSGSKSGTSASLAITGLQSEDEADYYXQSRDTYGYYWVFGGGTKLTVLGQPKAAPSVTLFPPSSEELQANKATLVXLISDFYPGAVTVAWKGDSSPVKAGVETTTPSKQSNNKYAASSYLSLTPEQWKSHRSYSXQVTHEGSTVEKTVAPTEXS

SEQ ID NO: 950 - protein, 214 aa, Artificial Sequence
  Synthesized sequence with two or more selenocysteine residues substituted for two or more cysteine residues
  VARIANT (1)...(214): Xaa = selenocysteine or cysteine
DIQMTQSPSSLSASVGDRVTITXKASQHVITHVTWYQQKPGKAPKLLIYGTSYSYSGVPSRFSGSGSGTDFTLTISSLQPEDFATYYXQQFYEYPLTFGGGTKVEIKRTVAAPSVFIFPPSDEQLKSGTASVVXLLNNFYPREAKVQWKVDNALQSGNSQESVTEQDSKDSTYSLSSTLTLSKADYEKHKVYAXEVTHQGLSSPVTKSFNRGEX

SEQ ID NO: 951 - protein, 214 aa, Artificial Sequence
  Synthesized sequence with two or more selenocysteine residues substituted for two or more cysteine residues
  VARIANT (1)...(214): Xaa = selenocysteine or cysteine
EIVLTQSPATLSLSPGERATLSXRASQSVSSYLAWYQQKPGQAPRLLIYDASNRATGIPARFSGSGSGTDFTLTISSLEPEDFAVYYXQHRSNWPPTFGGGTKVEIKRTVAAPSVFIFPPSDEQLKSGTASVVXLLNNFYPREAKVQWKVDNALQSGNSQESVTEQDSKDSTYSLSSTLTLSKADYEKHKVYAXEVTHQGLSSPVTKSFNRGEX

SEQ ID NO: 952 - protein, 213 aa, Artificial Sequence
  Synthesized sequence with two or more selenocysteine residues substituted for two or more cysteine residues
  VARIANT (1)...(213): Xaa = selenocysteine or cysteine
QVVLTQSPVIMSASPGEKVTMTXSASSSISYMYWYQQKPGTSPKRWIYDTSKLASGVPARFSGSGSGTSYSLTISNMEAGDAATYYXHQRDSYPWTFGGGTNLEIKRTVAAPSVFIFPPSDEQLKSGTASVVXLLNNFYPREAKVQWKVDNALQSGNSQESVTEQDSKDSTYSLSSTLTLSKADYEKHKVYAXEVTHQGLSSPVTKSFNRGEX

SEQ ID NO: 953 - protein, 239 aa, Artificial Sequence
  Synthesized sequence with two or more selenocysteine residues substituted for two or more cysteine residues
  VARIANT (1)...(239): Xaa = selenocysteine or cysteine
MKLPVRLLVLLLFWIPASRGDVQVTQSPSSLSASVGDRVTITXRSSQSLANSYGNTFLSWYLHKPGKAPQLLIYGISNRFSGVPDRFSGSGSGTDFTLTISSLQPEDFATYYXLQGTHQPYTFGQGTKVEIKRTVAAPSVFIFPPSDEQLKSGTASVVXLLNNFYPREAKVQWKVDNALQSGNSQESVTEQDSKDSTYSLSSTLTLSKADYEKHKVYAXEVTHQGLSSPVTKSFNRGEX

SEQ ID NO: 954 - protein, 219 aa, Artificial Sequence
  Synthesized sequence with two or more selenocysteine residues substituted for two or more cysteine residues
  VARIANT (1)...(219): Xaa = selenocysteine or cysteine
QVLTQSPSSLSASVGDRVTINXQASQSVYHNTYLAWYQQKPGKVPKQLIYDASTLASGVPSRFSGSGSGTDFTLTISSLQPEDVATYYXLGSYDXTNGDXFVFGGGTKVEIKRTVAAPSVFIFPPSDEQLKSGTASVVXLLNNFYPREAKVQWKVDNALQSGNSQESVTEQDSKDSTYSLSSTLTLSKADYEKHKVYAXEVTHQGLSSPVTKSFNRGEX

SEQ ID NO: 955 - protein, 216 aa, Artificial Sequence
  Synthesized sequence with two or more selenocysteine residues substituted for two or more cysteine residues
  VARIANT (1)...(216): Xaa = selenocysteine or cysteine
QSVLTQPPSVSAAPGQKVTISXSGSSSNIGNNYVSWYQQLPGTAPKLLIYDNNKRPSGIPDRFSGSKSGTSTTLGITGLQTGDEADYYXGTWDSRLSAVVFGGGTKLTVLGQPKANPTVTLFPPSSEELQANKATLVXLISDFYPGAVTVAWKADGSPVKAGVETTKPSKQSNNKYAASSYLSLTPEQWKSHRSYSXQVTHEGSTVEKTVAPTEXS

SEQ ID NO: 956 - protein, 214 aa, Artificial Sequence
  Synthesized sequence with two or more selenocysteine residues substituted for two or more cysteine residues
  VARIANT (1)...(214): Xaa = selenocysteine or cysteine
DIQMTQSPSSLSASVGDRVTITXRASQDINNYLNWYQQKPGKAPKLLIYYTSTLHSGVPSRFSGSGSGTDYTLTISSLQPEDFATYYXQQGNTLPPTFGQGTKVEIKRTVAAPSVFIFPPSDEQLKSGTASVVXLLNNFYPREAKVQWKVDNALQSGNSQESVTEQDSKDSTYSLSSTLTLSKADYEKHKVYAXEVTHQGLSSPVTKSFNRGEX

SEQ ID NO: 957 - protein, 214 aa, Artificial Sequence
  Synthesized sequence with two or more selenocysteine residues substituted for two or more cysteine residues
  VARIANT (1)...(214): Xaa = selenocysteine or cysteine
EIVLTQSPATLSLSPGERATLSXQASQSISNFLHWYQQRPGQAPRLLIRYRSQSISGIPARFSGSGSGTDFTLTISSLEPEDFAVYYXQQSGSWPLTFGGGTKVEIKRTVAAPSVFIFPPSDEQLKSGTASVVXLLNNFYPREAKVQWKVDNALQSGNSQESVTEQDSKDSTYSLSSTLTLSKADYEKHKVYAXEVTHQGLSSPVTKSFNRGEX

SEQ ID NO: 958 - protein, 214 aa, Artificial Sequence
  Synthesized sequence with two or more selenocysteine residues substituted for two or more cysteine residues
  VARIANT (1)...(214): Xaa = selenocysteine or cysteine
DIQMTQSPSSLSASVGDRVTITXRASESVDDLLHWYQQKPGKAPKLLIKYASQSISGVPSRFSGSGSGTDFTLTISSLQPEDFATYYXQQGNSLPNTFGQGTKVEIKRTVAAPSVFIFPPSDEQLKSGTASVVXLLNNFYPREAKVQWKVDNALQSGNSQESVTEQDSKDSTYSLSSTLTLSKADYEKHKVYAXEVTHQGLSSPVTKSFNRGEX

SEQ ID NO: 959 - protein, 214 aa, Artificial Sequence
  Synthesized sequence with two or more selenocysteine residues substituted for two or more cysteine residues
  VARIANT (1)...(214): Xaa = selenocysteine or cysteine
DIQMTQSPSTLSASVGDRVTITXRASQSIRSWLAWYQQKPGKAPKLLIYKASSLESGVPSRFSGSGSGTEFTLTISSLQPDDFATYYXQQYNSYSYTFGQGTKLEIKRTVAAPSVFIFPPSDEQLKSGTASVVXLLNNFYPREAKVQWKVDNALQSGNSQESVTEQDSKDSTYSLSSTLTLSKADYEKHKVYAXEVTHQGLSSPVTKSFNRGEX

SEQ ID NO: 960 - protein, 217 aa, Artificial Sequence
  Synthesized sequence with two or more selenocysteine residues substituted for two or more cysteine residues
  VARIANT (1)...(217): Xaa = selenocysteine or cysteine
ESVLTQPPSVSGAPGQRVTISXTGSSSNIGAGYDVHWYQQLPGTAPKLLISGNSNRPSGVPDRFSGSKSGTSASLAITGLQAEDEADYYXQSYDSSLSGSVFGGGTKLTVLGQPKAAPSVTLFPPSSEELQANKATLVXLISDFYPGAVTVAWKADSSPVKAGVETTTPSKQSNNKYAASSYLSLTPEQWKSHRSYSXQVTHEGSTVEKTVAPTEXS

SEQ ID NO: 961 - protein, 217 aa, Artificial Sequence
  Synthesized sequence with two or more selenocysteine residues substituted for two or more cysteine residues
  VARIANT (1)...(217): Xaa = selenocysteine or cysteine
DIQLTQSPSSLSASVGDRVTITXSVSSSISSNNLHWYQQKPGKAPKPWIYGTSNLASGVPSRFSGSGSGTDYTFTISSLQPEDIATYYXQQWSSYPYMYTFGQGTKVEIKRTVAAPSVFIFPPSDEQLKSGTASVVXLLNNFYPREAKVQWKVDNALQSGNSQESVTEQDSKDSTYSLSSTLTLSKADYEKHKVYAXEVTHQGLSSPVTKSFNRGEX

SEQ ID NO: 962 - protein, 214 aa, Artificial Sequence
  Synthesized sequence with two or more selenocysteine residues substituted for two or more cysteine residues
  VARIANT (1)...(214): Xaa = selenocysteine or cysteine
DIQMTQSPSSLSASAGDRVTITXRASQAIRNDLGWYQQKPGKAPKRLIYAAFNLQSGVPSRFSGSGSGTEFTLTISSLQPEDLASYYXQQYNRYPWTFGQGTKVEIKRTVAAPSVFIFPPSDEQLKSGTASVVXLLNNFYPREAKVQWKVDNALQSGNSQESVTEQDSKDSTYSLSSTLTLSKADYEKHKVYAXEVTHQGLSSPVTKSFNRGEX

SEQ ID NO: 963 - protein, 217 aa, Artificial Sequence
  Synthesized sequence with two or more selenocysteine residues substituted for two or more cysteine residues
  VARIANT (1)...(217): Xaa = selenocysteine or cysteine
QAVLTQPPSVSGAPGQRVTISXTGSSSNIGAGYGVHWYQQLPGTAPKLLIYGDSNRPSGVPDRFSGSKSGTSASLAITGLQAEDEADYYXQSYDNSLSGYVFGGGTQLTVLGQPKAAPSVTLFPPSSEELQANKATLVXLISDFYPGAVTVAWKADSSPVKAGVETTTPSKQSNNKYAASSYLSLTPEQWKSHRSYSXQVTHEGSTVEKTVAPTEXS

SEQ ID NO: 964 - protein, 214 aa, Artificial Sequence
  Synthesized sequence with two or more selenocysteine residues substituted for two or more cysteine residues
  VARIANT (1)...(214): Xaa = selenocysteine or cysteine
DIVMTQSPDSLAMSLGERVTLNXKASENVVSYVSWYQQKPGQSPKLLIYGASNRESGVPDRFSGSGSATDFTLTISSVQAEDVADYHXGQSYNYPYTFGQGTKLEIKRTVAAPSVFIFPPSDEQLKSGTASVVXLLNNFYPREAKVQWKVDNALQSGNSQESVTEQDSKDSTYSLSSTLTLSKADYEKHKVYAXEVTHQGLSSPVTKSFNRGEX

SEQ ID NO: 965 - protein, 214 aa, Artificial Sequence
  Synthesized sequence with two or more selenocysteine residues substituted for two or more cysteine residues
  VARIANT (1)...(214): Xaa = selenocysteine or cysteine
DIQMTQFPSSLSASVGDRVTITXRASQGIRNDLGWYQQKPGKAPKRLIYAASRLHRGVPSRFSGSGSGTEFTLTISSLQPEDFATYYXLQHNSYPXSFGQGTKLEIKRTVAAPSVFIFPPSDEQLKSGTASVVXLLNNFYPREAKVQWKVDNALQSGNSQESVTEQDSKDSTYSLSSTLTLSKADYEKHKVYAXEVTHQGLSSPVTKSFNRGEX

SEQ ID NO: 966 - protein, 215 aa, Artificial Sequence
  Synthesized sequence with two or more selenocysteine residues substituted for two or more cysteine residues
  VARIANT (1)...(215): Xaa = selenocysteine or cysteine
EIVLTQSPATLSLSPGERATLSXRASQSVSSYLAWYQQKPGQAPRLLIYDASNRATGIPARFSGSGSGTDFTLTISSLEPEDFAVYYXQQRSNWLMYTFGQGTKLEIKRTVAAPSVFIFPPSDEQLKSGTASVVXLLNNFYPREAKVQWKVDNALQSGNSQESVTEQDSKDSTYSLSSTLTLSKADYEKHKVYAXEVTHQGLSSPVTKSFNRGEX

SEQ ID NO: 967 - protein, 214 aa, Artificial Sequence
  Synthesized sequence with two or more selenocysteine residues substituted for two or more cysteine residues
  VARIANT (1)...(214): Xaa = selenocysteine or cysteine
AIQLTQSPSSLSASVGDRVTITXRASQGISSALAWYQQKPGKAPKLLIYDASSLESGVPSRFSGSGSGTDFTLTISSLQPEDFATYYXQQFNSYPLTFGGGTKVEIKRTVAAPSVFIFPPSDEQLKSGTASVVXLLNNFYPREAKVQWKVDNALQSGNSQESVTEQDSKDSTYSLSSTLTLSKADYEKHKVYAXEVTHQGLSSPVTKSFNRGEX

SEQ ID NO: 968 - protein, 214 aa, Artificial Sequence
  Synthesized sequence with two or more selenocysteine residues substituted for two or more cysteine residues
  VARIANT (1)...(214): Xaa = selenocysteine or cysteine
DIQMTQSPSTLSASVGDRVTITXKASENVDTYVSWYQQKPGKAPKLLIYGASNRYTGVPSRFSGSGSGTDFTLTISSLQPDDFATYYXGQSYNYPFTFGQGTKVEVKRTVAAPSVFIFPPSDEQLKSGTASVVXLLNNFYPREAKVQWKVDNALQSGNSQESVTEQDSKDSTYSLSSTLTLSKADYEKHKVYAXEVTHQGLSSPVTKSFNRGEX

SEQ ID NO: 969 - protein, 215 aa, Artificial Sequence
  Synthesized sequence with two or more selenocysteine residues substituted for two or more cysteine residues
  VARIANT (1)...(215): Xaa = selenocysteine or cysteine
EIVLTQSPATLSLSPGERATLSXRASQSVSSYLAWYQQKPGQAPRLLIYDASNRATGIPARFSGSGSGTDFTLTISSLEPEDFAVYYXQQRSNWPPLTFGGGTKVEIKRTVAAPSVFIFPPSDEQLKSGTASVVXLLNNFYPREAKVQWKVDNALQSGNSQESVTEQDSKDSTYSLSSTLTLSKADYEKHKVYAXEVTHQGLSSPVTKSFNRGEX

SEQ ID NO: 970 - protein, 214 aa, Artificial Sequence
  Synthesized sequence with two or more selenocysteine residues substituted for two or more cysteine residues
  VARIANT (1)...(214): Xaa = selenocysteine or cysteine
DIQMTQSPSSLSASVGDRVTITXRASQGIRNDLGWYQQKPGKAPKLLIYAASSLQSGVPSRFSGSGSGTDFTLTISSLQPEDFATYYXQQLNSYPPTFGGGTKVEIKRTVAAPSVFIFPPSDEQLKSGTASVVXLLNNFYPREAKVQWKVDNALQSGNSQESVTEQDSKDSTYSLSSTLTLSKADYEKHKVYAXEVTHQGLSSPVTKSFNRGEX

SEQ ID NO: 971 - protein, 214 aa, Artificial Sequence
  Synthesized sequence with two or more selenocysteine residues substituted for two or more cysteine residues
  VARIANT (1)...(214): Xaa = selenocysteine or cysteine
EIVLTQSPATLSLSPGERATLSXKASKRVTTYVSWYQQKPGQAPRLLIYGASNRYLGIPARFSGSGSGTDFTLTISSLEPEDFAVYYXSQSYNYPYTFGQGTKLEIKRTVAAPSVFIFPPSDEQLKSGTASVVXLLNNFYPREAKVQWKVDNALQSGNSQESVTEQDSKDSTYSLSSTLTLSKADYEKHKVYAXEVTHQGLSSPVTKSFNRGEX

SEQ ID NO: 972 - protein, 215 aa, Artificial Sequence
  Synthesized sequence with two or more selenocysteine residues substituted for two or more cysteine residues
  VARIANT (1)...(215): Xaa = selenocysteine or cysteine
ETVLTQSPGTLSLSPGERATLSXRASQSLGSSYLAWYQQKPGQAPRLLIYGASSRAPGIPDRFSGSGSGTDFTLTISRLEPEDFAVYYXQQYADSPITFGQGTRLEIKRTVAAPSVFIFPPSDEQLKSGTASVVXLLNNFYPREAKVQWKVDNALQSGNSQESVTEQDSKDSTYSLSSTLTLSKADYEKHKVYAXEVTHQGLSSPVTKSFNRGEX

SEQ ID NO: 973 - protein, 214 aa, Artificial Sequence; identical to SEQ ID NO: 967
  Synthesized sequence with two or more selenocysteine residues substituted for two or more cysteine residues
  VARIANT (1)...(214): Xaa = selenocysteine or cysteine

SEQ ID NO: 974 - protein, 214 aa, Artificial Sequence
  Synthesized sequence with two or more selenocysteine residues substituted for two or more cysteine residues
  VARIANT (1)...(214): Xaa = selenocysteine or cysteine
DIQMTQTTSSLSASLGDRVTISXRTSQDIGNYLNWYQQKPDGTVKLLIYYTSRLHSGVPSRFSGSGSGTDFSLTINNVEQEDVATYFXQHYNTVPPTFGGGTKLEIKRTVAAPSVFIFPPSDEQLKSGTASVVXLLNNFYPREAKVQWKVDNALQSGNSQESVTEQDSKDSTYSLSSTLTLSKADYEKHKVYAXEVTHQGLSSPVTKSFNRGEX

SEQ ID NO: 975 - protein, 214 aa, Artificial Sequence
  Synthesized sequence with two or more selenocysteine residues substituted for two or more cysteine residues
  VARIANT (1)...(214): Xaa = selenocysteine or cysteine
DIQMTQSPSSLSASVGDRVTITXRASKDISKYLNWYQQKPGKAPKLLIYYTSGYHSGVPSRFSGSGSGTDFTLTISSLQPEDFATYYXQQGDALPPTFGGGTKVEIKRTVAAPSVFIFPPSDEQLKSGTASVVXLLNNFYPREAKVQWKVDNALQSGNSQESVTEQDSKDSTYSLSSTLTLSKADYEKHKVYAXEVTHQGLSSPVTKSFNRGEX

SEQ ID NO: 976 - protein, 236 aa, Artificial Sequence
  Synthesized sequence with two or more selenocysteine residues substituted for two or more cysteine residues
  VARIANT (1)...(236): Xaa = selenocysteine or cysteine
MRVPAQLLGLLLLWLPGARXESALTQPPSVSGAPGQKVTISXTGSTSNIGGYDLHWYQQLPGTAPKLLIYDINKRPSGISDRFSGSKSGTAASLAITGLQTEDEADYYXQSYDSSLNAQVFGGGTRLTVLGQPKAAPTVTLFPPSSEELQANKATLVXLISDFYPGAVTVAWKADSSPVKAGVETTTPSKQSNNKYAASSYLSLTPEQWKSHRSYSXQVTHEGSTVEKTVAPTEXS

SEQ ID NO: 977 - protein, 219 aa, Artificial Sequence
  Synthesized sequence with two or more selenocysteine residues substituted for two or more cysteine residues
  VARIANT (1)...(219): Xaa = selenocysteine or cysteine
DVVMTQSPLSLPVTPGEPASISXRSSQSLLHSNGYNYLDWYLQKPGQSPQLLIYLGSNRASGVPDRFSGSGSGTDFTLKISRVEAEDVGVYYXMQGTHWPLTFGQGTKVEIKRTVAAPSVFIFPPSDEQLKSGTASVVXLLNNFYPREAKVQWKVDNALQSGNSQESVTEQDSKDSTYSLSSTLTLSKADYEKHKVYAXEVTHQGLSSPVTKSFNRGEX

SEQ ID NO: 978 - protein, 215 aa, Artificial Sequence
  Synthesized sequence with two or more selenocysteine residues substituted for two or more cysteine residues
  VARIANT (1)...(215): Xaa = selenocysteine or cysteine
DIVLTQSPATLSLSPGERATLSXRASQSVSSSYLAWYQQKPGQAPRLLIYGASSRATGVPARFSGSGSGTDFTLTISSLEPEDFATYYXLQIYNMPITFGQGTKVEIKRTVAAPSVFIFPPSDEQLKSGTASVVXLLNNFYPREAKVQWKVDNALQSGNSQESVTEQDSKDSTYSLSSTLTLSKADYEKHKVYAXEVTHQGLSSPVTKSFNRGEX

SEQ ID NO: 979 - protein, 214 aa, Artificial Sequence
  Synthesized sequence with two or more selenocysteine residues substituted for two or more cysteine residues
  VARIANT (1)...(214): Xaa = selenocysteine or cysteine
DIQMTQSTSSLSASVGDRVTITXRASQDISNYLSWYQQKPGKAVKLLIYYTSKLHSGVPSRFSGSGSGTDYTLTISSLQQEDFATYFXLQGKMLPWTFGQGTKLEIKRTVAAPSVFIFPPSDEQLKSGTASVVXLLNNFYPREAKVQWKVDNALQSGNSQESVTEQDSKDSTYSLSSTLTLSKADYEKHKVYAXEVTHQGLSSPVTKSFNRGEX

SEQ ID NO: 980 - protein, 214 aa, Artificial Sequence
  Synthesized sequence with two or more selenocysteine residues substituted for two or more cysteine residues
  VARIANT (1)...(214): Xaa = selenocysteine or cysteine
DIVMTQSQRFMSTTVGDRVSITXKASQNVVSAVAWYQQKPGQSPKLLIYSASNRYTGVPDRFTGSGSGTDFTLTISNMQSEDLADFFXQQYSNYPWTFGGGTKLEIKRTVAAPSVFIFPPSDEQLKSGTASVVXLLNNFYPREAKVQWKVDNALQSGNSQESVTEQDSKDSTYSLSSTLTLSKADYEKHKVYAXEVTHQGLSSPVTKSFNRGEX

SEQ ID NO: 981 - protein, 215 aa, Artificial Sequence
  Synthesized sequence with two or more selenocysteine residues substituted for two or more cysteine residues
  VARIANT (1)...(215): Xaa = selenocysteine or cysteine
EIVMTQSPATLSVSPGERATLSXRASQSVDNNLVWYQQKPGQAPRLLIYGASTRATGIPARFSGSGSGTEFTLTISSLQSEDFAVYYXQQYNNWPPWTFGQGTKVEIKRTVAAPSVFIFPPSDEQLKSGTASVVXLLNNFYPREAKVQWKVDNALQSGNSQESVTEQDSKDSTYSLSSTLTLSKADYEKHKVYAXEVTHQGLSSPVTKSFNRGEX

SEQ ID NO: 982 - protein, 217 aa, Artificial Sequence
  Synthesized sequence with two or more selenocysteine residues substituted for two or more cysteine residues
  VARIANT (1)...(217): Xaa = selenocysteine or cysteine
QSVLTQPPSVSGAPGQRVTISXTGSSSNIGSGYDVHWYQQLPGTAPKLLIYGNSKRPSGVPDRFSGSKSGTSASLAITGLQSEDEADYYXASWTDGLSLVVFGGGTKLTVLGQPKAAPSVTLFPPSSEELQANKATLVXLISDFYPGAVTVAWKADSSPVKAGVETTTPSKQSNNKYAASSYLSLTPEQWKSHRSYSXQVTHEGSTVEKTVAPTEXS

SEQ ID NO: 983 - protein, 219 aa, Artificial Sequence
  Synthesized sequence with two or more selenocysteine residues substituted for two or more cysteine residues
  VARIANT (1)...(219): Xaa = selenocysteine or cysteine
DIVMTQSPDSLAVSLGERVTMNXKSSQSLLYSTNQKNYLAWYQQKPGQSPKLLIYWASTRESGVPDRFSGSGSGTDFTLTISSVQAEDVAVYYXQQYYSYRTFGGGTKLEIKRTVAAPSVFIFPPSDEQLKSGTASVVXLLNNFYPREAKVQWKVDNALQSGNSQESVTEQDSKDSTYSLSSTLTLSKADYEKHKVYAXEVTHQGLSSPVTKSFNRGEX

SEQ ID NO: 984 - protein, 215 aa, Artificial Sequence
  Synthesized sequence with two or more selenocysteine residues substituted for two or more cysteine residues
  VARIANT (1)...(215): Xaa = selenocysteine or cysteine
EIVLTQSPGTLSLSPGERATLSXRASQSVSSSYLAWYQQKPGQAPRLLIYGASSRATGIPDRFSGSGSGTDFTLTISRLEPEDFAVYYXQQYGSSPLTFGGGTKVEIKRTVAAPSVFIFPPSDEQLKSGTASVVXLLNNFYPREAKVQWKVDNALQSGNSQESVTEQDSKDSTYSLSSTLTLSKADYEKHKVYAXEVTHQGLSSPVTKSFNRGEX

SEQ ID NO: 985 - protein, 214 aa, Artificial Sequence
  Synthesized sequence with two or more selenocysteine residues substituted for two or more cysteine residues
  VARIANT (1)...(214): Xaa = selenocysteine or cysteine
DIQMTQSPSFLSASVGDRVTITXRASQGIISYLAWYQQKPEKAPKRLIYAASSLQSGVPSRFSGSGSGTEFTLTISSLQPEDFATYYXGQYANYPYTFGQGTKLEIKRTVAAPSVFIFPPSDEQLKSGTASVVXLLNNFYPREAKVQWKVDNALQSGNSQESVTEQDSKDSTYSLSSTLTLSKADYEKHKVYAXEVTHQGLSSPVTKSFNRGEX

SEQ ID NO: 986 - protein, 214 aa, Artificial Sequence
  Synthesized sequence with two or more selenocysteine residues substituted for two or more cysteine residues
  VARIANT (1)...(214): Xaa = selenocysteine or cysteine
DIQMTQSPSSLSASVGDRVTITXRSSQRIMTYLNWYQQKPGKAPKLLIFVASHSQSGVPSRFRGSGSETDFTLTISGLQPEDSATYYXQQSFWTPLTFGGGTKVEIKRTVAAPSVFIFPPSDEQLKSGTASVVXLLNNFYPREAKVQWKVDNALQSGNSQESVTEQDSKDSTYSLSSTLTLSKADYEKHKVYAXEVTHQGLSSPVTKSFNRGEX

SEQ ID NO: 987 - protein, 213 aa, Artificial Sequence
  Synthesized sequence with two or more selenocysteine residues substituted for two or more cysteine residues
  VARIANT (1)...(213): Xaa = selenocysteine or cysteine
DIQMTQSPSSLSASVGDRVTITXRASQGINNYLNWYQQKPGKAPKRLIYNTNNLQTGVPSRFSGSGSGTEFTLTISSLQPEDFATYYXLQHNSFPTFGQGTKLEIKRTVAAPSVFIFPPSDEQLKSGTASVVXLLNNFYPREAKVQWKVDNALQSGNSQESVTEQDSKDSTYSLSSTLTLSKADYEKHKVYAXEVTHQGLSSPVTKSFNRGEX

SEQ ID NO: 988 - protein, 214 aa, Artificial Sequence; identical to SEQ ID NO: 813
  Synthesized sequence with two or more selenocysteine residues substituted for two or more cysteine residues
  VARIANT (1)...(214): Xaa = selenocysteine or cysteine

SEQ ID NO: 989 - protein, 214 aa, Artificial Sequence
  Synthesized sequence with two or more selenocysteine residues substituted for two or more cysteine residues
  VARIANT (1)...(214): Xaa = selenocysteine or cysteine
DIQMTQSTSSLSASLGDRVTISXSASQGINNYLNWYQQKPDGTVELLIYYTSTLQSGVPSRFSGSGSGTDYSLTISNLEPEDIGTYYXQQYSKLPRTFGGGTKLEIKRTVAAPSVFIFPPSDEQLKSGTASVVXLLNNFYPREAKVQWKVDNALQSGNSQESVTEQDSKDSTYSLSSTLTLSKADYEKHKVYAXEVTHQGLSSPVTKSFNRGEX

SEQ ID NO: 990 - protein, 214 aa, Artificial Sequence
  Synthesized sequence with two or more selenocysteine residues substituted for two or more cysteine residues
  VARIANT (1)...(214): Xaa = selenocysteine or cysteine
EIVMTQSPATLSVSPGERATLSXRASQSVSRNLAWYQQKPGQAPRLLIYGASTRATGIPARFSGSGSGTEFTLTIGSLQSEDFAVYYXQQYKTWPRTFGQGTNVEIKRTVAAPSVFIFPPSDEQLKSGTASVVXLLNNFYPREAKVQWKVDNALQSGNSQESVTEQDSKDSTYSLSSTLTLSKADYEKHKVYAXEVTHQGLSSPVTKSFNRGEX

SEQ ID NO: 991 - protein, 214 aa, Artificial Sequence; identical to SEQ ID NO: 990
  Synthesized sequence with two or more selenocysteine residues substituted for two or more cysteine residues
  VARIANT (1)...(214): Xaa = selenocysteine or cysteine

SEQ ID NO: 992 - protein, 218 aa, Artificial Sequence
  Synthesized sequence with two or more selenocysteine residues substituted for two or more cysteine residues
  VARIANT (1)...(218): Xaa = selenocysteine or cysteine
EIVLTQSPDFQSVTPKEKVTITXRASESVDTFGISFMNWFQQKPDQSPKLLIHEASNQGSGVPSRFSGSGSGTDFTLTINSLEAEDAATYYXQQSKEVPFTFGGGTKVEIKRTVAAPSVFIFPPSDEQLKSGTASVVXLLNNFYPREAKVQWKVDNALQSGNSQESVTEQDSKDSTYSLSSTLTLSKADYEKHKVYAXEVTHQGLSSPVTKSFNRGEX

SEQ ID NO: 993 - protein, 239 aa, Artificial Sequence; identical to SEQ ID NO: 953
  Synthesized sequence with two or more selenocysteine residues substituted for two or more cysteine residues
  VARIANT (1)...(239): Xaa = selenocysteine or cysteine

SEQ ID NO: 994 - protein, 215 aa, Artificial Sequence
  Synthesized sequence with two or more selenocysteine residues substituted for two or more cysteine residues
  VARIANT (1)...(215): Xaa = selenocysteine or cysteine
EIVLTQSPATLSLSPGERATLSXRASQSVSSYLAWYQQKPGQAPRLLIYDASNRATGIPARFSGSGSGTDFTLTISSLEPEDFAVYYXQQRSNWPPFTFGPGTKVDIKRTVAAPSVFIFPPSDEQLKSGTASVVXLLNNFYPREAKVQWKVDNALQSGNSQESVTEQDSKDSTYSLSSTLTLSKADYEKHKVYAXEVTHQGLSSPVTKSFNRGEX

SEQ ID NO: 995 - protein, 214 aa, Artificial Sequence
  Synthesized sequence with two or more selenocysteine residues substituted for two or more cysteine residues
  VARIANT (1)...(214): Xaa = selenocysteine or cysteine
DIVMTQSHLSMSTSLGDPVSITXKASQDVSTVVAWYQQKPGQSPRRLIYSASYRYIGVPDRFTGSGAGTDFTFTISSVQAEDLAVYYXQQHYSPPYTFGGGTKLEIKRTVAAPSVFIFPPSDEQLKSGTASVVXLLNNFYPREAKVQWKVDNALQSGNSQESVTEQDSKDSTYSLSSTLTLSKADYEKHKVYAXEVTHQGLSSPVTKSFNRGEX

SEQ ID NO: 996 - protein, 214 aa, Artificial Sequence
  Synthesized sequence with two or more selenocysteine residues substituted for two or more cysteine residues
  VARIANT (1)...(214): Xaa = selenocysteine or cysteine
DIQMTQSPSSLSASVGDRVTITXKASRDIRSYLTWYQQKPGKAPKTLIYYATSLADGVPSRFSGSGSGQDYSLTISSLESDDTATYYXLQHGESPFTLGSGTKLEIKRTVAAPSVFIFPPSDEQLKSGTASVVXLLNNFYPREAKVQWKVDNALQSGNSQESVTEQDSKDSTYSLSSTLTLSKADYEKHKVYAXEVTHQGLSSPVTKSFNRGEX

SEQ ID NO: 997 - protein, 219 aa, Artificial Sequence
  Synthesized sequence with two or more selenocysteine residues substituted for two or more cysteine residues
  VARIANT (1)...(219): Xaa = selenocysteine or cysteine
DIVMTQTPLSLSVTPGQPASISXRSSRSLVHSRGNTYLHWYLQKPGQSPQLLIYKVSNRFIGVPDRFSGSGSGTDFTLKISRVEAEDVGVYYXSQSTHLPFTFGQGTKLEIKRTVAAPSVFIFPPSDEQLKSGTASVVXLLNNFYPREAKVQWKVDNALQSGNSQESVTEQDSKDSTYSLSSTLTLSKADYEKHKVYAXEVTHQGLSSPVTKSFNRGEX

SEQ ID NO: 998 - protein, 213 aa, Artificial Sequence; identical to SEQ ID NO: 831
  Synthesized sequence with two or more selenocysteine residues substituted for two or more cysteine residues
  VARIANT (1)...(213): Xaa = selenocysteine or cysteine

SEQ ID NO: 999 - protein, 214 aa, Artificial Sequence
  Synthesized sequence with two or more selenocysteine residues substituted for two or more cysteine residues
  VARIANT (1)...(214): Xaa = selenocysteine or cysteine
DIQVTQSPSSLSASVGDRVTITXITSTDIDDDMNWYQQKPGKVPKLLISGGNTLRPGVPSRFSGSGSGTDFTLTISSLQPEDVATYYXLQSDSLPYTFGQGTKVEIKRTVAAPSVFIFPPSDEQLKSGTASVVXLLNNFYPREAKVQWKVDNALQSGNSQESVTEQDSKDSTYSLSSTLTLSKADYEKHKVYAXEVTHQGLSSPVTKSFNRGEX

SEQ ID NO: 1000 - protein, 213 aa, Artificial Sequence
  Synthesized sequence with two or more selenocysteine residues substituted for two or more cysteine residues
  VARIANT (1)...(213): Xaa = selenocysteine or cysteine
DIQMTQSPSTLSASVGDRVTITXRASQSISSWLAWYQQKPGKAPKLLIYKASTLESGVPSRFSGSGSGTEFTLTISSLQPDDFATYYXQQYNTYWTFGQGTKVEIKRTVAAPSVFIFPPSDEQLKSGTASVVXLLNNFYPREAKVQWKVDNALQSGNSQESVTEQDSKDSTYSLSSTLTLSKADYEKHKVYAXEVTHQGLSSPVTKSFNRGEX

SEQ ID NO: 1001 - protein, 215 aa, Artificial Sequence
  Synthesized sequence with two or more selenocysteine residues substituted for two or more cysteine residues
  VARIANT (1)...(215): Xaa = selenocysteine or cysteine
EIVLTQSPGTLSLSPGERATLSXRASSSVSSSYLHWYQQKPGQAPRLLIYSTSNLVAGIPDRFSGSGSGTDFTLTISRLEPEDFAVYYXQHHSGYHFTFGGGTKVEIKRTVAAPSVFIFPPSDEQLKSGTASVVXLLNNFYPREAKVQWKVDNALQSGNSQESVTEQDSKDSTYSLSSTLTLSKADYEKHKVYAXEVTHQGLSSPVTKSFNRGEX

SEQ ID NO: 1002 - protein, 214 aa, Artificial Sequence
  Synthesized sequence with two or more selenocysteine residues substituted for two or more cysteine residues
  VARIANT (1)...(214): Xaa = selenocysteine or cysteine
DIQMTQSPSSLSASVGDRVTITXKASQDINNYLAWYQHKPGKGPKLLIHYTSTLHPGIPSRFSGSGSGRDYSFSISSLEPEDIATYYXLQYDNLLYTFGQGTKLEIKRTVAAPSVFIFPPSDEQLKSGTASVVSLLNNFYPREAKVQWKVDNALQSGNSQESVTEQDSKDSTYSLSSTLTLSKADYEKHKVYAXEVTHQGLSSPVTKSFNRGEX

SEQ ID NO: 1003 - protein, 218 aa, Artificial Sequence
  Synthesized sequence with two or more selenocysteine residues substituted for two or more cysteine residues
  VARIANT (1)...(218): Xaa = selenocysteine or cysteine
DIVMTQSPDSLSVSLGERATINXRASKSVDSYGNSFMHWYQQKPGQPPKLLIYLASNLESGVPDRFSGSGSGTDFTLTISSLQAEDVAVYYXQQNNEDPRTFGGGTKVEIKRTVAAPSVFIFPPSDEQLKSGTASVVXLLNNFYPREAKVQWKVDNALQSGNSQESVTEQDSKDSTYSLSSTLTLSKADYEKHKVYAXEVTHQGLSSPVTKSFNRGEX

SEQ ID NO: 1004 - protein, 218 aa, Artificial Sequence
  Synthesized sequence with two or more selenocysteine residues substituted for two or more cysteine residues
  VARIANT (1)...(218): Xaa = selenocysteine or cysteine
DIQMTQSPSSLSASVGDRVTITXRASESVDSYGNAFMHWYQQKPGKAPKLLIYRASNLESGVPSRFSGSGSGTDFTLTISSLQPEDFATYYXQQSNEDPYTFGGGTKVEIKRTVAAPSVFIFPPSDEQLKSGTASVVXLLNNFYPREAKVQWKVDNALQSGNSQESVTEQDSKDSTYSLSSTLTLSKADYEKHKVYAXEVTHQGLSSPVTKSFNRGEX

SEQ ID NO: 1005 - protein, 214 aa, Artificial Sequence
  Synthesized sequence with two or more selenocysteine residues substituted for two or more cysteine residues
  VARIANT (1)...(214): Xaa = selenocysteine or cysteine
EIVLTQSPATLSVSPGERATLSXRASQSVGTNVAWYQQKPGQAPRVLIYSTSSRATGITDRFSGSGSGTDFTLTISRLEPEDFAVYYXQQFNKSPLTFGGGTKVEIKRTVAAPSVFIFPPSDEQLKSGTASVVXLLNNFYPREAKVQWKVDNALQSGNSQESVTEQDSKDSTYSLSSTLTLSKADYEKHKVYAXEVTHQGLSSPVTKSFNRGEX

SEQ ID NO: 1006 - protein, 214 aa, Artificial Sequence
  Synthesized sequence with two or more selenocysteine residues substituted for two or more cysteine residues
  VARIANT (1)...(214): Xaa = selenocysteine or cysteine
SSELTQDPAVSVALGQTVRITXQGDSLRSYYASWYQQKPGQAPVLVIYGKNNRPSGIPDRFSGSSSGNTASLTITGAQAEDEADYYXNSRDSSGNHVVFGGGTKLTVLGQPKAAPSVTLFPPSSEELQANKATLVXLISDFYPGAVTVAWKADSSPVKAGVETTTPSKQSNNKYAASSYLSLTPEQWKSHRSYSXQVTHEGSTVEKTVAPTEXS

SEQ ID NO: 1007 - protein, 219 aa, Artificial Sequence
  Synthesized sequence with two or more selenocysteine residues substituted for two or more cysteine residues
  VARIANT (1)...(219): Xaa = selenocysteine or cysteine
DIQMTQSPSSLSASVGDRVTITXRSSETLVHSSGNTYLEWYQQKPGKAPKLLIYRVSNRFSGVPSRFSGSGSGTDFTLTISSLQPEDFATYYXFQGSFNPLTFGQGTKVEIKRTVAAPSVFIFPPSDEQLKSGTASVVXLLNNFYPREAKVQWKVDNALQSGNSQESVTEQDSKDSTYSLSSTLTLSKADYEKHKVYAXEVTHQGLSSPVTKSFNRGEX

SEQ ID NO: 1008 - protein, 214 aa, Artificial Sequence
  Synthesized sequence with two or more selenocysteine residues substituted for two or more cysteine residues
  VARIANT (1)...(214): Xaa = selenocysteine or cysteine
EIVMTQSPATLSVSPGERATLSXRASQSIGTNIHWYQQKPGQAPRLLIYYASESISGIPARFSGSGSGTEFTLTISSLQSEDFAVYYXQQSWSWPTTFGGGTKVEIKRTVAAPSVFIFPPSDEQLKSGTASVVXLLNNFYPREAKVQWKVDNALQSGNSQESVTEQDSKDSTYSLSSTLTLSKADYEKHKVYAXEVTHQGLSSPVTKSFNRGEX

SEQ ID NO: 1009 - protein, 214 aa, Artificial Sequence
  Synthesized sequence with two or more selenocysteine residues substituted for two or more cysteine residues
  VARIANT (1)...(214): Xaa = selenocysteine or cysteine
DIVMTQSHKLLSTSVGDRVSITXKASQDVSTAVDWYQQKPGQSPKLLINWASTRHTGVPDRFTGSGSGTDYTLTISSMQAEDLALYYXRQHYSTPFTFGSGTKLEIKRADAAPTVSIFPPSSEQLTSGGASVVXFLNNFYPKDINVKWKIDGSERQNGVLNSWTDQDSKDSTYSMSSTLTLTKDEYERHNSYTXEATHKTSTSPIVKSFNRNEX

SEQ ID NO: 1010 - protein, 214 aa, Artificial Sequence
  Synthesized sequence with two or more selenocysteine residues substituted for two or more cysteine residues
  VARIANT (1)...(214): Xaa = selenocysteine or cysteine
EIVLTQSPVTLSLSPGERATLSXRASQSVSSYLAWYQQKPGQAPRLLIYDASNRATGIPARFSGSGSGTDFTLTISSLEPEDFAVYYXQQRSNWMYTFGQGTKLEIKRTVAAPSVFIFPPSDEQLKSGTASVVXLLNNFYPREAKVQWKVDNALQSGNSQESVTEQDSKDSTYSLSSTLTLSKADYEKHKVYAXEVTHQGLSSPVTKSFNRGEX

SEQ ID NO: 1011 - protein, 213 aa, Artificial Sequence
  Synthesized sequence with two or more selenocysteine residues substituted for two or more cysteine residues
  VARIANT (1)...(213): Xaa = selenocysteine or cysteine
QIVLTQSPATLSVSPGERATLSXRASQSVSYMHWYQQKPGQAPRLLIYGVFRRATGIPDRFSGSGSGTDFTLTIGRLEPEDFAVYYXLQWSSDPPTFGQGTKLEIKRTVAAPSVFIFPPSDEQLKSGTASVVXLLNNFYPREAKVQWKVDNALQSGNSQESVTEQDSKDSTYSLSSTLTLSKADYEKHKVYAXEVTHQGLSSPVTKSFNRGEX

SEQ ID NO: 1012 - protein, 219 aa, Artificial Sequence
  Synthesized sequence with two or more selenocysteine residues substituted for two or more cysteine residues
  VARIANT (1)...(219): Xaa = selenocysteine or cysteine
DVVMTQSPLSLPVTLGQPASISXRSSQIIIHSDGNTYLEWFQQRPGQSPRRLIYKVSNRFSGVPDRFSGSGSGTDFTLKISRVEAEDVGVYYXFQGSHVPHTFGQGTKVEIKRTVAAPSVFIFPPSDEQLKSGTASVVXLLNNFYPREAKVQWKVDNALQSGNSQESVTEQDSKDSTYSLSSTLTLSKADYEKHKVYAXEVTHQGLSSPVTKSFNRGEX

SEQ ID NO: 1013 - protein, 219 aa, Artificial Sequence
  Synthesized sequence with two or more selenocysteine residues substituted for two or more cysteine residues
  VARIANT (1)...(219): Xaa = selenocysteine or cysteine
DIVMTQSPLSLTVTPGEPASISXRSSQSLLYSNGYNYLDWYLQKPGQSPQVLISLGSNRASGVPDRFSGSGSGTDFTLKISRVEAEDVGVYYXMQARQTPFTFGPGTKVDIRRTVAAPSVFIFPPSDEQLKSGTASVVXLLNNFYPREAKVQWKVDNALQSGNSQESVTEQDSKDSTYSLSSTLTLSKADYEKHKVYAXEVTHQGLSSPVTKSFNRGEX

SEQ ID NO: 1014 - protein, 214 aa, Artificial Sequence
  Synthesized sequence with two or more selenocysteine residues substituted for two or more cysteine residues
  VARIANT (1)...(214): Xaa = selenocysteine or cysteine
DIVMTQSHKFMSTSVGDRVSITXKASQDVNTAVAWYQQKPGHSPKLLIYSASFRYTGVPDRFTGSRSGTDFTFTISSVQAEDLAVYYXQQHYTTPPTFGGGTKVEIKRTVAAPSVFIFPPSDEQLKSGTASVVXLLNNFYPREAKVQWKVDNALQSGNSQESVTEQDSKDSTYSLSSTLTLSKADYEKHKVYAXEVTHQGLSSPVTKSFNRGEX

SEQ ID NO: 1015 - protein, 217 aa, Artificial Sequence
  Synthesized sequence with two or more selenocysteine residues substituted for two or more cysteine residues
  VARIANT (1)...(217): Xaa = selenocysteine or cysteine
QSVLTQPPSVSGAPGQRVTISXTGSGSNIGAPYDVSWYQQLPGTAPKLLIYHNNKRPSGVPDRFSGSKSGTSASLAITGLQAEDEADYYXATVEAGLSGSVFGGGTKLTVLGQPKAAPSVTLFPPSSEELQANKATLVXLISDFYPGAVTVAWKADSSPVKAGVETTTPSKQSNNKYAASSYLSLTPEQWKSHRSYSXQVTHEGSTVEKTVAPTEXS

SEQ ID NO: 1016 - protein, 219 aa, Artificial Sequence
  Synthesized sequence with two or more selenocysteine residues substituted for two or more cysteine residues
  VARIANT (1)...(219): Xaa = selenocysteine or cysteine
DIQLTQSPLSLPVTLGQPASISXRSSQSLVHRNGNTYLHWFQQRPGQSPRLLIYTVSNRFSGVPDRFSGSGSGTDFTLKISRVEAEDVGVYFXSQSSHVPPTFGAGTRLEIKRTVAAPSVFIFPPSDEQLKSGTASVVXLLNNFYPREAKVQWKVDNALQSGNSQESVTEQDSKDSTYSLSSTLTLSKADYEKHKVYAXEVTHQGLSSPVTKSFNRGEX

SEQ ID NO: 1017 - protein, 218 aa, Artificial Sequence
  Synthesized sequence with two or more selenocysteine residues substituted for two or more cysteine residues
  VARIANT (1)...(218): Xaa = selenocysteine or cysteine
DIVLTQSPLSLAVSLGQPAIISXKASQSVSFAGTSLMHWYHQKPGQQPRLLIYRASNLEAGVPDRFSGSGSKTDFTLTISPVEAEDAATYYXQQSREYPYTFGGGTKLEIKRTVAAPSVFIFPPSDEQLKSGTASVVXLLNNFYPREAKVQWKVDNALQSGNSQESVTEQDSKDSTYSLSSTLTLSKADYEKHKVYAXEVTHQGLSSPVTKSFNRGEX

SEQ ID NO: 1018 - protein, 219 aa, Artificial Sequence
  Synthesized sequence with two or more selenocysteine residues substituted for two or more cysteine residues
  VARIANT (1)...(219): Xaa = selenocysteine or cysteine
DVLMTQSPLSLPVTPGEPASISXRSSRNIVHINGDTYLEWYLQKPGQSPQLLIYKVSNRFSGVPDRFSGSGSGTDFTLKISRVEAEDVGVYYXFQGSLLPWTFGQGTKVEIKRTVAAPSVFIFPPSDEQLKSGTASVVXLLNNFYPREAKVQWKVDNALQSGNSQESVTEQDSKDSTYSLSSTLTLSKADYEKHKVYAXEVTHQGLSSPVTKSFNRGEX

SEQ ID NO: 1019 - protein, 214 aa, Artificial Sequence
  Synthesized sequence with two or more selenocysteine residues substituted for two or more cysteine residues
  VARIANT (1)...(214): Xaa = selenocysteine or cysteine
DIQMTQSPSSLSASVGDRVTITXRASENIYSYLAWYQQKPGKAPKLLIYNAKTLAEGVPSRFSGSGSGTDFTLTISSLQPEDFATYYXQHHYGTPRTFGGGTKVEIKRTVAAPSVFIFPPSDEQLKSGTASVVXLLNNFYPREAKVQWKVDNALQSGNSQESVTEQDSKDSTYSLSSTLTLSKADYEKHKVYAXEVTHQGLSSPVTKSFNRGEX

SEQ ID NO: 1020 - protein, 213 aa, Artificial Sequence
  Synthesized sequence with two or more selenocysteine residues substituted for two or more cysteine residues
  VARIANT (1)...(213): Xaa = selenocysteine or cysteine
DIQMTQSPSTLSASVGDRVTITXSASSRVGYMHWYQQKPGKAPKLLIYDTSKLASGVPSRFSGSGSGTEFTLTISSLQPDDFATYYXFQGSGYPFTFGGGTKVEIKRTVAAPSVFIFPPSDEQLKSGTASVVXLLNNFYPREAKVQWKVDNALQSGNSQESVTEQDSKDSTYSLSSTLTLSKADYEKHKVYAXEVTHQGLSSPVTKSFNRGEX

SEQ ID NO: 1021 - protein, 214 aa, Artificial Sequence
  Synthesized sequence with two or more selenocysteine residues substituted for two or more cysteine residues
  VARIANT (1)...(214): Xaa = selenocysteine or cysteine
DIQMTQSPSSVSASVGDRVTIAXRASQNIRNILNWYQQRPGKAPQLLIYAASNLQSGVPSRFSGSGSGTDFTLTINSLQPEDFATYYXQQSYSMPRTFGGGTKLEIKRTVAAPSVFIFPPSDEQLKSGTASVVXLLNNFYPREAKVQWKVDNALQSGNSQESVTEQDSKDSTYSLSSTLTLSKADYEKHKVYAXEVTHQGLSSPVTKSFNRGEX

SEQ ID NO: 1022 - protein, 214 aa, Artificial Sequence
  Synthesized sequence with two or more selenocysteine residues substituted for two or more cysteine residues
  VARIANT (1)...(214): Xaa = selenocysteine or cysteine
SIVMTQTPTSLLVSAGDRVTITXKASQSVSNDVAWYQQKPGQSPKLLISYTSSRYAGVPDRFSGSGYGTDFTLTISSVQAEDAAVYFXQQDYNSPPTFGGGTKLEIKRADAAPTVSIFPPSSEQLTSGGASVVXFLNNFYPKDINVKWKIDGSERQNGVLNSWTDQDSKDSTYSMSSTLTLTKDEYERHNSYTXEATHKTSTSPIVKSFNRNES

SEQ ID NO: 1023 - protein, 214 aa, Artificial Sequence
  Synthesized sequence with two or more selenocysteine residues substituted for two or more cysteine residues
  VARIANT (1)...(214): Xaa = selenocysteine or cysteine
DIQMTQSPSSLSVSVGERVTITXRASENIRSNLAWYQQKPGKSPKLLVNVATNLADGVPSRFSGSGSGTDYSLKINSLQPEDFGTYYXQHYWGTTWTFGQGTKLEIKRTVAAPSVFIFPPSDEQLKSGTASVVXLLNNFYPREAKVQWKVDNALQSGNSQESVTEQDSKDSTYSLSSTLTLSKADYEKHKVYAXEVTHQGLSSPVTKSFNRGEX

SEQ ID NO: 1024 - protein, 214 aa, Artificial Sequence
  Synthesized sequence with two or more selenocysteine residues substituted for two or more cysteine residues
  VARIANT (1)...(214): Xaa = selenocysteine or cysteine
EIVLTQSPATLSLSPGERATLSXRASQSVSRYLAWYQQKPGQAPRLLIYDASNRATGIPARFSGSGSGTDFTLTISSLEPEDFAVYYXQQRSNWPRTFGQGTKVEIKRTVAAPSVFIFPPSDEQLKSGTASVVXLLNNFYPREAKVQWKVDNALQSGNSQESVTEQDSKDSTYSLSSTLTLSKADYEKHKVYAXEVTHQGLSSPVTKSFNRGEX

SEQ ID NO: 1025 - protein, 218 aa, Artificial Sequence; identical to SEQ ID NO: 927
  Synthesized sequence with two or more selenocysteine residues substituted for two or more cysteine residues
  VARIANT (1)...(218): Xaa = selenocysteine or cysteine

SEQ ID NO: 1026 - protein, 214 aa, Artificial Sequence
  Synthesized sequence with two or more selenocysteine residues substituted for two or more cysteine residues
  VARIANT (1)...(214): Xaa = selenocysteine or cysteine
EIVMTQSPATLSLSPGERATLSXRASQSVSSYLAWYQQKPGQAPRLLIYDASNRATGIPARFSGSGSGTDFTLTISSLEPEDFAVYYXHQYGSTPLTFGGGTKAEIKRTVAAPSVFIFPPSDEQLKSGTASVVXLLNNFYPREAKVQWKVDNALQSGNSQESVTEQDSKDSTYSLSSTLTLSKADYEKHKVYAXEVTHQGLSSPVTKSFNRGEX

SEQ ID NO: 1027 - protein, 214 aa, Artificial Sequence
  Synthesized sequence with two or more selenocysteine residues substituted for two or more cysteine residues
  VARIANT (1)...(214): Xaa = selenocysteine or cysteine
DIQMTQSPSSLSASVGDRVTITXQASEDIYSFVAWYQQKPGKAPKLLIYNAQTEAQGVPSRFSGSGSGTDFTLTISSLQPEDFATYYXQHHYDSPLTFGGGTKVEIKRTVAAPSVFIFPPSDEQLKSGTASVVXLLNNFYPREAKVQWKVDNALQSGNSQESVTEQDSKDSTYSLSSTLTLSKADYEKHKVYAXEVTHQGLSSPVTKSFNRGEX

SEQ ID NO: 1028 - protein, 214 aa, Artificial Sequence
  Synthesized sequence with two or more selenocysteine residues substituted for two or more cysteine residues
  VARIANT (1)...(214): Xaa = selenocysteine or cysteine
EIVLTQSPGTLSLSPGERATLSXRASQSVSSTYLAWYQQKPGQAPRLLIYGASSRATGIPDRFSGSGSGTDFTLTISRLEPEDFAVYYXQHYDNSQTFGQGTKVEIKRTVAAPSVFIFPPSDEQLKSGTASVVXLLNNFYPREAKVQWKVDNALQSGNSQESVTEQDSKDSTYSLSSTLTLSKADYEKHKVYAXEVTHQGLSSPVTKSFNRGEX

SEQ ID NO: 1029 - protein, 214 aa, Artificial Sequence
  Synthesized sequence with two or more selenocysteine residues substituted for two or more cysteine residues
  VARIANT (1)...(214): Xaa = selenocysteine or cysteine
EIVLTQSPATLSLSPGERATLSXRASQSVSSYLAWYQQKPGQAPRLLIYDASNRATGIPARFSGSGSGTDFTLTISSLEPEDFAVYYXQQSSNWPRTFGQGTKVEIKRTVAAPSVFIFPPSDEQLKSGTASVVXLLNNFYPREAKVQWKVDNALQSGNSQESVTEQDSKDSTYSLSSTLTLSKADYEKHKVYAXEVTHQGLSSPVTKSFNRGEX

SEQ ID NO: 1030 - protein, 219 aa, Artificial Sequence
  Synthesized sequence with two or more selenocysteine residues substituted for two or more cysteine residues
  VARIANT (1)...(219): Xaa = selenocysteine or cysteine
DIVMTQTPLSLPVTPGEPASISXRSSKSLLHSNGITYLYWYLQKPGQSPQLLIYQMSNLVSGVPDRFSGSGSGTDFTLKISRVEAEDVGVYYXAQNLELPYTFGGGTKVEIKRTVAAPSVFIFPPSDEQLKSGTASVVXLLNNFYPREAKVQWKVDNALQSGNSQESVTEQDSKDSTYSLSSTLTLSKADYEKHKVYAXEVTHQGLSSPVTKSFNRGEX

SEQ ID NO: 1031 - protein, 213 aa, Artificial Sequence
  Synthesized sequence with two or more selenocysteine residues substituted for two or more cysteine residues
  VARIANT (1)...(213): Xaa = selenocysteine or cysteine
EIVLTQSPGTLSLSPGERATLSXRASSSVPYIHWYQQKPGQAPRLLIYATSALASGIPDRFSGSGSGTDFTLTISRLEPEDFAVYYXQQWLSNPPTFGQGTKLEIKRTVAAPSVFIFPPSDEQLKSGTASVVXLLNNFYPREAKVQWKVDNALQSGNSQESVTEQDSKDSTYSLSSTLTLSKADYEKHKVYAXEVTHQGLSSPVTKSFNRGEX

SEQ ID NO: 1032 - protein, 212 aa, Artificial Sequence
  Synthesized sequence with two or more selenocysteine residues substituted for two or more cysteine residues
  VARIANT (1)...(212): Xaa = selenocysteine or cysteine
DIQMTQSPSSLSASVGDRVTITXRASSSVSYMHWYQQKPGKAPKPLIYAPSNLASGVPSRFSGSGSGTDFTLTISSLQPEDFATYYXQQWSFNPPTFGQGTKVEIKRTVAAPSVFIFPPSDEQLKSGTASWXLLNNFYPREAKVQWKVDNALQSGNSQESVTEQDSKDSTYSLSSTLTLSKADYEKHKVYAXEVTHQGLSSPVTKSFNRGEX

SEQ ID NO: 1033 - protein, 214 aa, Artificial Sequence
  Synthesized sequence with two or more selenocysteine residues substituted for two or more cysteine residues
  VARIANT (1)...(214): Xaa = selenocysteine or cysteine
EIVLTQSPATLSLSPGERATLSXRASQSVSSYLAWYQQKPGQAPRLLIYDASNRATGIPARFSGSGSGTDFTLTISSLEPEDFAVYYXQQRSNWPPAFGQGTKVEIKRTVAAPSVFIFPPSDEQLKSGTASVVXLLNNFYPREAKVQWKVDNALQSGNSQESVTEQDSKDSTYSLSSTLTLSKADYEKHKVYAXEVTHQGLSSPVTKSFNRGEX

SEQ ID NO: 1034 - protein, 214 aa, Artificial Sequence
  Synthesized sequence with two or more selenocysteine residues substituted for two or more cysteine residues
  VARIANT (1)...(214): Xaa = selenocysteine or cysteine
DIQMTQSPSSLSASVGDRVTITXQASQDIGISLSWYQQKPGKAPKLLIYNANNLADGVPSRFSGSGSGTDFTLTISSLQPEDFATYYXLQHNSAPYTFGQGTKLEIKRTVAAPSVFIFPPSDEQLKSGTASVVXLLNNFYPREAKVQWKVDNALQSGNSQESVTEQDSKDSTYSLSSTLTLSKADYEKHKVYAXEVTHQGLSSPVTKSFNRGEX

SEQ ID NO: 1035 - protein, 218 aa, Artificial Sequence
  Synthesized sequence with two or more selenocysteine residues substituted for two or more cysteine residues
  VARIANT (1)...(218): Xaa = selenocysteine or cysteine
DIQLTQSPSSLSASVGDRVTITXRASQSVDYDGDSYMNWYQQKPGKAPKLLIYAASYLESGVPSRFSGSGSGTDFTLTISSLQPEDFATYYXQQSHEDPYTFGQGTKVEIKRTVAAPSVFIFPPSDEQLKSGTASVVXLLNNFYPREAKVQWKVDNALQSGNSQESVTEQDSKDSTYSLSSTLTLSKADYEKHKVYAXEVTHQGLSSPVTKSFNRGEX

SEQ ID NO: 1036 - protein, 220 aa, Artificial Sequence
  Synthesized sequence with two or more selenocysteine residues substituted for two or more cysteine residues
  VARIANT (1)...(220): Xaa = selenocysteine or cysteine
DIQMTQSPSSLSASVGDRVTITXKSSQSLLYTSSQKNYLAWYQQKPGKAPKLLIYWASTRESGVPSRFSGSGSGTDFTLTISSLQPEDFATYYXQQYYAYPWTFGQGTKVEIKRTVAAPSVFIFPPSDEQLKSGTASVVXLLNNFYPREAKVQWKVDNALQSGNSQESVTEQDSKDSTYSLSSTLTLSKADYEKHKVYAXEVTHQGLSSPVTKSFNRGEX

SEQ ID NO: 1037 - protein, 215 aa, Artificial Sequence
  Synthesized sequence with two or more selenocysteine residues substituted for two or more cysteine residues
  VARIANT (1)...(215): Xaa = selenocysteine or cysteine
DIQMTQSPSSLSASVGDRVTITXRASQNVGTAVAWLQQTPGKAPKLLIYSASNRYTGVPSRFSGSGSGTDYTFTISSLQPEDIATYYXQQYTNYPMYTFGQGTKVQIKRTVAAPSVFIFPPSDEQLKSGTASVVXLLNNFYPREAKVQWKVDNALQSGNSQESVTEQDSKDSTYSLSSTLTLSKADYEKHKVYAXEVTHQGLSSPVTKSFNRGEX

SEQ ID NO: 1038 - protein, 214 aa, Artificial Sequence
  Synthesized sequence with two or more selenocysteine residues substituted for two or more cysteine residues
  VARIANT (1)...(214): Xaa = selenocysteine or cysteine
DIQMTQSPGTLSLSPGERATLSXRASQSVSSYLAWYQQKPGQAPRLLIYDASNRATGIPARFSGSGSGTEFTLTISSLQSEDFAVYYXQQYDKWPLTFGGGTKVEIKRTVAAPSVFIFPPSDEQLKSGTASVVXLLNNFYPREAKVQWKVDNALQSGNSQESVTEQDSKDSTYSLSSTLTLSKADYEKHKVYAXEVTHQGLSSPVTKSFNRGEX

SEQ ID NO: 1039 - protein, 216 aa, Artificial Sequence
  Synthesized sequence with two or more selenocysteine residues substituted for two or more cysteine residues
  VARIANT (1)...(216): Xaa = selenocysteine or cysteine
QSVLTQPPSASGTPGQRVTISXSGSNTNIGKNYVSWYQQLPGTAPKLLIYANSNRPSGVPDRFSGSKSGTSASLAISGLRSEDEADYYXASWDASLNGWVFGGGTKLTVLGQPKAAPSVTLFPPSSEELQANKATLVXLISDFYPGAVTVAWKADSSPVKAGVETTTPSKQSNNKYAASSYLSLTPEQWKSHRSYSXQVTHEGSTVEKTVAPTEXS

SEQ ID NO: 1040 - protein, 216 aa, Artificial Sequence
  Synthesized sequence with two or more selenocysteine residues substituted for two or more cysteine residues
  VARIANT (1)...(216): Xaa = selenocysteine or cysteine
DIQLTQPNSVSTSLGSTVKLSXTLSSGNIENNYVHWYQLYEGRSPTTMIYDDDKRPDGVPDRFSGSIDRSSNSAFLTIHNVAIEDEAIYFXHSYVSSFNVFGGGTKLTVLRQPKAAPSVTLFPPSSEELQANKATLVXLISDFYPGAVTVAWKADSSPVKAGVETTTPSKQSNNKYAASSYLSLTPEQWKSHRSYSXQVTHEGSTVEKTVAPTEXS

SEQ ID NO: 1041 - protein, 214 aa, Artificial Sequence
  Synthesized sequence with two or more selenocysteine residues substituted for two or more cysteine residues
  VARIANT (1)...(214): Xaa = selenocysteine or cysteine
DIQMTQSPSSLSASVGDRVTITXRASQGISSWLAWYQQKPEKAPKSLIYAASSLQSGVPSRFSGSGSGTDFTLTISSLQPEDFATYYXQQYNSYPYTFGQGTKLEIKRTVAAPSVFIFPPSDEQLKSGTASVVXLLNNFYPREAKVQWKVDNALQSGNSQESVTEQDSKDSTYSLSSTLTLSKADYEKHKVYAXEVTHQGLSSPVTKSFNRGEX

SEQ ID NO: 1042 - protein, 219 aa, Artificial Sequence
  Synthesized sequence with two or more selenocysteine residues substituted for two or more cysteine residues
  VARIANT (1)...(219): Xaa = selenocysteine or cysteine
DIVMTQSPLSNPVTLGQPVSISXRSSKSLLYKDGKTYLNWFLQRPGQSPQLLIYLMSTRASGVPDRFSGGGSGTDFTLKISRVEAEDVGVYYXQQLVEYPLTFGQGTKLEIKRTVAAPSVFIFPPSDEQLKSGTASVVXLLNNFYPREAKVQWKVDNALQSGNSQESVTEQDSKDSTYSLSSTLTLSKADYEKHKVYAXEVTHQGLSSPVTKSFNRGEX

SEQ ID NO: 1043 - protein, 213 aa, Artificial Sequence
  Synthesized sequence with two or more selenocysteine residues substituted for two or more cysteine residues
  VARIANT (1)...(213): Xaa = selenocysteine or cysteine
DIQMTQSPSTLSASVGDRVTITXKXQLSVGYMHWYQQKPGKAPKLLIYDTSKLASGVPSRFSGSGSGTEFTLTISSLQPDDFATYYXFQGSGYPFTFGGGTKLEIKRTVAAPSVFIFPPSDEQLKSGTASVVXLLNNFYPREAKVQWKVDNALQSGNSQESVTEQDSKDSTYSLSSTLTLSKADYEKHKVYAXEVTHQGLSSPVTKSFNRGEX

SEQ ID NO: 1044 - protein, 214 aa, Artificial Sequence
  Synthesized sequence with two or more selenocysteine residues substituted for two or more cysteine residues
  VARIANT (1)...(214): Xaa = selenocysteine or cysteine
DIQMTQSPSSLSASVGDRVTITXRASQGISSWLAWYQQKPEKAPKSLIYAASSLQSGVPSRFSGSGSGTDFTLTISSLQPEDFATYYXQQYNSYPPTFGQGTKLEIKRTVAAPSVFIFPPSDEQLKSGTASVVXLLNNFYPREAKVQWKVDNALQSGNSQESVTEQDSKDSTYSLSSTLTLSKADYEKHKVYAXEVTHQGLSSPVTKSFNRGEX

SEQ ID NO: 1045 - protein, 214 aa, Artificial Sequence
  Synthesized sequence with two or more selenocysteine residues substituted for two or more cysteine residues
  VARIANT (1)...(214): Xaa = selenocysteine or cysteine
DIQMTQSPSSLSASVGDRVTITXQASQDISNYLNWYQQKPGKAPKLLIYDASNLETGVPSRFSGSGSGTDFTFTISSLQPEDIATYFXQHFDHLPLAFGGGTKVEIKRTVAAPSVFIFPPSDEQLKSGTASVVXLLNNFYPREAKVQWKVDNALQSGNSQESVTEQDSKDSTYSLSSTLTLSKADYEKHKVYAXEVTHQGLSSPVTKSFNRGEX

SEQ ID NO: 1046 - protein, 219 aa, Artificial Sequence
  Synthesized sequence with two or more selenocysteine residues substituted for two or more cysteine residues
  VARIANT (1)...(219): Xaa = selenocysteine or cysteine
DIQMTQSPSSLSASVGDRVTITXRTSQSLVHINAITYLHWYQQKPGKAPKLLIYRVSNRFSGVPSRFSGSGSGTDFTLTISSLQPEDFATYYXGQSTHVPLTFGQGTKVEIKRTVAAPSVFIFPPSDEQLKSGTASVVXLLNNFYPREAKVQWKVDNALQSGNSQESVTEQDSKDSTYSLSSTLTLSKADYEKHKVYAXEVTHQGLSSPVTKSFNRGEX

SEQ ID NO: 1047 - protein, 214 aa, Artificial Sequence
  Synthesized sequence with two or more selenocysteine residues substituted for two or more cysteine residues
  VARIANT (1)...(214): Xaa = selenocysteine or cysteine
DIQMTQSPSSLSASVGDRVTITXRASQAVSSAVAWYQQKPGKAPKLLIYSASHRYTGVPSRFSGSGSGTDFTLTISSLQPEDFATYYXQESYSTPWTFGQGTKVEIKRTVAAPSVFIFPPSDEQLKSGTASVVXLLNNFYPREAKVQWKVDNALQSGNSQESVTEQDSKDSTYSLSSTLTLSKADYEKHKVYAXEVTHQGLSSPVTKSFNRGEX

SEQ ID NO: 1048 - protein, 220 aa, Artificial Sequence
  Synthesized sequence with two or more selenocysteine residues substituted for two or more cysteine residues
  VARIANT (1)...(220): Xaa = selenocysteine or cysteine
DIEMTQSPDSLAVSLGERATINXRSSQSVLYSSSNRNYLAWYQQNPGQPPKLLIYWASTRESGVPDRFSGSGSGTDFTLTISSLQAEDVAVYYXQQYYSTPRTFGQGTKVEIKRTVAAPSVFIFPPSDEQLKSGTASVVXLLNNFYPREAKVQWKVDNALQSGNSQESVTEQDSKDSTYSLSSTLTLSKADYEKHKVYAXEVTHQGLSSPVTKSFNRGEX

SEQ ID NO: 1049 - protein, 218 aa, Artificial Sequence
  Synthesized sequence with two or more selenocysteine residues substituted for two or more cysteine residues
  VARIANT (1)...(218): Xaa = selenocysteine or cysteine
EIVLTQSPATLSLSPGERATLSXRASKGVSTSGYSYLHWYQQKPGQAPRLLIYLASYLESGVPARFSGSGSGTDFTLTISSLEPEDFAVYYXQHSRDLPLTFGGGTKVEIKRTVAAPSVFIFPPSDEQLKSGTASVVXLLNNFYPREAKVQWKVDNALQSGNSQESVTEQDSKDSTYSLSSTLTLSKADYEKHKVYAXEVTHQGLSSPVTKSFNRGEX

SEQ ID NO: 1050 - protein, 215 aa, Artificial Sequence
  Synthesized sequence with two or more selenocysteine residues substituted for two or more cysteine residues
  VARIANT (1)...(215): Xaa = selenocysteine or cysteine
DIQMTQSPSSLSASVGDRVTITXRASQDINSYLSWFQQKPGKAPKSLIVRANRLVDGVPSRFSGSGSGQDYSLTISSLQPEDFATYYXLQYDAFPPYTFGQGTKLEIKRTVAAPSVFIFPPSDEQLKSGTASVVXLLNNFYPREAKVQWKVDNALQSGNSQESVTEQDSKDSTYSLSSTLTLSKADYEKHKVYAXEVTHQGLSSPVTKSFNRGEX

SEQ ID NO: 1051 - protein, 213 aa, Artificial Sequence
  Synthesized sequence with two or more selenocysteine residues substituted for two or more cysteine residues
  VARIANT (1)...(213): Xaa = selenocysteine or cysteine
EIVLTQSPSSLSASVGDRVTITXSARSSVSYMHWFQQKPGKAPKLWIYRTSNLASGVPSRFSGSGSGTSYXLTINSLQPEDFATYYXQQRSSFPLTFGGGTKLEIKRTVAAPSVFIFPPSDEQLKSGTASVVXLLNNFYPREAKVQWKVDNALQSGNSQESVTEQDSKDSTYSLSSTLTLSKADYEKHKVYAXEVTHQGLSSPVTKSFNRGEX

SEQ ID NO: 1052 - protein, 219 aa, Artificial Sequence
  Synthesized sequence with two or more selenocysteine residues substituted for two or more cysteine residues
  VARIANT (1)...(219): Xaa = selenocysteine or cysteine
DIQMTQSPSSLSASVGDRVTITXRSSQSIVHSVGNTFLEWYQQKPGKAPKLLIYKVSNRFSGVPSRFSGSGSGTDFTLTISSLQPEDFATYYXFQGSQFPYTFGQGTKVEIKRTVAAPSVFIFPPSDEQLKSGTASVVXLLNNFYPREAKVQWKVDNALQSGNSQESVTEQDSKDSTYSLSSTLTLSKADYEKHKVYAXEVTHQGLSSPVTKSFNRGEX

SEQ ID NO: 1053 - protein, 219 aa, Artificial Sequence
  Synthesized sequence with two or more selenocysteine residues substituted for two or more cysteine residues
  VARIANT (1)...(219): Xaa = selenocysteine or cysteine
DVVMTQSPLSLPVTLGQPASISXKSSQSLLDSDGKTFLNWFQQRPGQSPRRLIYLVSKLDSGVPDRFSGSGSGTDFTLKISRVEAEDVGVYYXWQGTHFPYTFGQGTRLEIKRTVAAPSVFIFPPSDEQLKSGTASVVXLLNNFYPREAKVQWKVDNALQSGNSQESVTEQDSKDSTYSLSSTLTLSKADYEKHKVYAXEVTHQGLSSPVTKSFNRGEX

SEQ ID NO: 1054 - protein, 214 aa, Artificial Sequence
  Synthesized sequence with two or more selenocysteine residues substituted for two or more cysteine residues
  VARIANT (1)...(214): Xaa = selenocysteine or cysteine
DIQMTQSPSSLSASVGDRVTITXRASQDISNYLNWYQQKPGKAPKLLIYYTSRLRSGVPSRFSGSGSGTDFTLTISSLQPEDFATYYXQQGHTLPPTFGQGTKVEIKRTVAAPSVFIFPPSDEQLKSGTASVVXLLNNFYPREAKVQWKVDNALQSGNSQESVTEQDSKDSTYSLSSTLTLSKADYEKHKVYAXEVTHQGLSSPVTKSFNRGEX

SEQ ID NO: 1055 - protein, 218 aa, Artificial Sequence
  Synthesized sequence with two or more selenocysteine residues substituted for two or more cysteine residues
  VARIANT (1)...(218): Xaa = selenocysteine or cysteine
DIQLTQSPSSLSASVGDRVTITXKASQSVDYEGDSFLNWYQQKPGKAPKLLIYAASNLESGVPSRFSGSGSGTDFTLTISSLQPEDFATYYXQQSNEDPLTFGQGTKVEIKRTVAAPSVFIFPPSDEQLKSGTASVVXLLNNFYPREAKVQWKVDNALQSGNSQESVTEQDSKDSTYSLSSTLTLSKADYEKHKVYAXEVTHQGLSSPVTKSFNRGEX

SEQ ID NO: 1056 - protein, 219 aa, Artificial Sequence
  Synthesized sequence with two or more selenocysteine residues substituted for two or more cysteine residues
  VARIANT (1)...(219): Xaa = selenocysteine or cysteine
DVVMTQSPLSLPVTLGQPASISXKSSQSLLYSDAKTYLNWFQQRPGQSPRRLIYQISRLDPGVPDRFSGSGSGTDFTLKISRVEAEDVGVYYXLQGTHYPVLFGQGTRLEIKRTVAAPSVFIFPPSDEQLKSGTASVVXLLNNFYPREAKVQWKVDNALQSGNSQESVTEQDSKDSTYSLSSTLTLSKADYEKHKVYAXEVTHQGLSSPVTKSFNRGEX

SEQ ID NO: 1057 - protein, 214 aa, Artificial Sequence
  Synthesized sequence with two or more selenocysteine residues substituted for two or more cysteine residues
  VARIANT (1)...(214): Xaa = selenocysteine or cysteine
DIQMTQSPSSLSASVGDRVTITXRASQGISNWLAWYQQKPEKAPKSLIYAASSLQSGVPSRFSGSGSGTDFTLTISSLQPEDFATYYXQQYDSYPRTFGQGTKVEIKRTVAAPSVFIFPPSDEQLKSGTASVVXLLNNFYPREAKVQWKVDNALQSGNSQESVTEQDSKDSTYSLSSTLTLSKADYEKHKVYAXEVTHQGLSSPVTKSFNRGEX

SEQ ID NO: 1058 - protein, 214 aa, Artificial Sequence
  Synthesized sequence with two or more selenocysteine residues substituted for two or more cysteine residues
  VARIANT (1)...(214): Xaa = selenocysteine or cysteine
DIVMSQSHKFMSTSVGDRVSITXKASQDVGTAVAWYQQNPGQSPKFLIYWASTRHTGVPDRFTGSGSGTDFTLTITNVQSEDLADYFXQQYSSYPLTFGAGTSLELKRTVAAPSVFIFPPSDEQLKSGTASVVXLLNNFYPREAKVQWKVDNALQSGNSQESVTEQDSKDSTYSLSSTLTLSKADYEKHKVYAXEVTHQGLSSPVTKSFNRGEX

SEQ ID NO: 1059 - protein, 219 aa, Artificial Sequence
  Synthesized sequence with two or more selenocysteine residues substituted for two or more cysteine residues
  VARIANT (1)...(219): Xaa = selenocysteine or cysteine
DIQMTQSPSSLSASVGDRVTITXRSSQSLVHNNANTYLHWYQQKPGKAPKLLIYKVSNRFSGVPSRFSGSGSGTDFTLTISSLQPEDFATYYXSQNTLVPWTFGQGTKVEIKRTVAAPSVFIFPPSDEQLKSGTASVVXLLNNFYPREAKVQWKVDNALQSGNSQESVTEQDSKDSTYSLSSTLTLSKADYEKHKVYAXEVTHQGLSSPVTKSFNRGEX

SEQ ID NO: 1060 - protein, 214 aa, Artificial Sequence
  Synthesized sequence with two or more selenocysteine residues substituted for two or more cysteine residues
  VARIANT (1)...(214): Xaa = selenocysteine or cysteine
DIQMTQTTSSLSASLGDRVTISXRASQDISNYLNWYQQKPDGTVKLLIYYTSRLHSGVPSRFSGSGSGTDYSLTISNLEQEDIATYFXQQGNTLPWTFGGGTKLEIKRADAAPTVSIFPPSSEQLTSGGASVVXFLNNFYPKDINVKWKIDGSERQNGVLNSWTDQDSKDSTYSMSSTLTLTKDEYERHNSYTXEATHKTSTSPIVKSFNRNEX

SEQ ID NO: 1061 - protein, 218 aa, Artificial Sequence
  Synthesized sequence with two or more selenocysteine residues substituted for two or more cysteine residues
  VARIANT (1)...(218): Xaa = selenocysteine or cysteine
QSALTQPRSVSGSPGQSVTISXTGTSSDIGGYNFVSWYQQHPGKAPKLMIYDATKRPSGVPDRFSGSKSGNTASLTISGLQAEDEADYYXXSYAGDYTPGVVFGGGTKLTVLGQPKAAPSVTLFPPSSEELQANKATLVXLISDFYPGAVTVAWKADSSPVKAGVETTTPSKQSNNKYAASSYLSLTPEQWKSHRSYSXQVTHEGSTVEKTVAPTEXS

SEQ ID NO: 1062 - protein, 214 aa, Artificial Sequence
  Synthesized sequence with two or more selenocysteine residues substituted for two or more cysteine residues
  VARIANT (1)...(214): Xaa = selenocysteine or cysteine
DIQMTQSPSSLSASVGDRVTITXKASQDVHTAVAWYQQKPGKAPKLLIYHASYRYTGVPSRFSGSGSGTDFTFTISSLQPEDIATYYXQQRYSLWRTFGQGTKLEIKRTVAAPSVFIFPPSDEQLKSGTASVVXLLNNFYPREAKVQWKVDNALQSGNSQESVTEQDSKDSTYSLSSTLTLSKADYEKHKVYAXEVTHQGLSSPVTKSFNRGEX

SEQ ID NO: 1063 - protein, 214 aa, Artificial Sequence
  Synthesized sequence with two or more selenocysteine residues substituted for two or more cysteine residues
  VARIANT (1)...(214): Xaa = selenocysteine or cysteine
DIQMTQSPSSVSASIGDRVTITXRASQGIDNWLGWYQQKPGKAPKLLIYDASNLDTGVPSRFSGSGSGTYFTLTISSLQAEDFAVYFXQQAKAFPPTFGGGTKVDIKGTVAAPSVFIFPPSDEQLKSGTASVVXLLNNFYPREAKVQWKVDNALQSGNSQESVTEQDSKDSTYSLSSTLTLSKADYEKHKVYAXEVTHQGLSSPVTKSFNRGEX

SEQ ID NO: 1064 - protein, 219 aa, Artificial Sequence
  Synthesized sequence with two or more selenocysteine residues substituted for two or more cysteine residues
  VARIANT (1)...(219): Xaa = selenocysteine or cysteine
DIVMTQSPDSLAVSLGERATINXKSSHSVLYSSNQKNYLAWYQQKPGQPPKLLIYWASTRESGVPDRFSGSGSGTDFTLTISSLQAEDVAVYYXHQYLSSLTFGQGTKLEIKRTVAAPSVFIFPPSDEQLKSGTASVVXLLNNFYPREAKVQWKVDNALQSGNSQESVTEQDSKDSTYSLSSTLTLSKADYEKHKVYAXEVTHQGLSSPVTKSFNRGEX

SEQ ID NO: 1065 - protein, 331 aa, Artificial Sequence
  Synthesized sequence with two or more selenocysteine residues substituted for two or more cysteine residues
  VARIANT (1)...(331): Xaa = selenocysteine or cysteine
DIQMTQSPSSLSASVGDRVTITXRASQGIRNYLAWYQQKPGKAPKLLIYAASTLQSGVPSRFSGSGSGTDFTLTISSLQPEDVATYYXQRYNRAPYTFGQGTKVEIKRGGSGGGGSGEIVLTQSPDFQSVTPKEKVTITXRASQDIGSELHWYQQKPDQPPKLLIKYASHSTSGVPSRFSGSGSGTDFTLTINGLEAEDAGTYYXHQTDSLPYTFGPGTKVDIKRTVAAPSVFIFPPSDEQLKSGTASVVXLLNNFYPREAKVQWKVDNALQSGNSQESVTEQDSKDSTYSLSSTLTLSKADYEKHKVYAXEVTHQGLSSPVTKSFNRGEX

SEQ ID NO: 1066 - protein, 215 aa, Artificial Sequence
  Synthesized sequence with two or more selenocysteine residues substituted for two or more cysteine residues
  VARIANT (1)...(215): Xaa = selenocysteine or cysteine
EIVMTQSPATLSVSPGERATLSXRASQSVDSNLAWYRQKPGQAPRLLIYGASTRATGIPARFSGSGSGTEFTLTISSLQSEDFAVYYXQQYINWPPITFGQGTRLEIKRTVAAPSVFIFPPSDEQLKSGTASVVXLLNNFYPREAKVQWKVDNALQSGNSQESVTEQDSKDSTYSLSSTLTLSKADYEKHKVYAXEVTHQGLSSPVTKSFNRGEX

SEQ ID NO: 1067 - protein, 215 aa, Artificial Sequence
  Synthesized sequence with two or more selenocysteine residues substituted for two or more cysteine residues
  VARIANT (1)...(215): Xaa = selenocysteine or cysteine
EIVLTQSPDTISLSPGERATLSXRASQSISSIYLAWYQQKPGQAPRLLIYGASSRVTGIPDRFSVSGSGTDFTLTISRLEPEDFAVYYXQHYGISPFTFGPGTKVDIRRTVAAPSVFIFPPSDEQLKSGTASVVXLLNNFYPREAKVQWKVDNALQSGNSQESVTEQDSKDSTYSLSSTLTLSKADYEKHKVYAXEVTHQGLSSPVTKSFNRGEX

SEQ ID NO: 1068 - protein, 214 aa, Artificial Sequence
  Synthesized sequence with two or more selenocysteine residues substituted for two or more cysteine residues
  VARIANT (1)...(214): Xaa = selenocysteine or cysteine
DIQMTQSPSSLSASVGDRVTITXKASRDVAIAVAWYQQKPGKVPKLLIYWASTRHTGVPSRFSGSGSRTDFTLTISSLQPEDVADYFXHQYSSYPFTFGSGTKLEIKRTVAAPSVFIFPPSDEQLKSGTASVVXLLNNFYPREAKVQWKVDNALQSGNSQESVTEQDSKDSTYSLSSTLTLSKADYEKHKVYAXEVTHQGLSSPVTKSFNRGEX

SEQ ID NO: 1069 - protein, 213 aa, Artificial Sequence
  Synthesized sequence with two or more selenocysteine residues substituted for two or more cysteine residues
  VARIANT (1)...(213): Xaa = selenocysteine or cysteine
QIVLSQSPAILSASPGEKVTMTXRASSSVSYIHWFQQKPGSSPKPWIYATSNLASGVPVRFSGSGSGTSYSLTISRVEAEDAATYYXQQWTSNPPTFGGGTKLEIKRTVAAPSVFIFPPSDEQLKSGTASVVXLLNNFYPREAKVQWKVDNALQSGNSQESVTEQDSKDSTYSLSSTLTLSKADYEKHKVYAXEVTHQGLSSPVTKSFNRGEX

SEQ ID NO: 1070 - protein, 214 aa, Artificial Sequence
  Synthesized sequence with two or more selenocysteine residues substituted for two or more cysteine residues
  VARIANT (1)...(214): Xaa = selenocysteine or cysteine
EIVLTQSPGTLSVSPGERATLSXRASQSIGSSLHWYQQKPGQAPRLLIKYASQSLSGIPDRFSGSGSGTDFTLTISRLEPEDFAVYYXHQSSRLPHTFGQGTKVEIKRTVAAPSVFIFPPSDEQLKSGTASVVXLLNNFYPREAKVQWKVDNALQSGNSQESVTEQDSKDSTYSLSSTLTLSKADYEKHKVYAXEVTHQGLSSPVTKSFNRGEX

SEQ ID NO: 1071 - protein, 214 aa, Artificial Sequence; identical to SEQ ID NO: 832
  Synthesized sequence with two or more selenocysteine residues substituted for two or more cysteine residues
  VARIANT (1)...(214): Xaa = selenocysteine or cysteine

SEQ ID NO: 1072 - protein, 214 aa, Artificial Sequence
  Synthesized sequence with two or more selenocysteine residues substituted for two or more cysteine residues
  VARIANT (1)...(214): Xaa = selenocysteine or cysteine
DIQMTQSPSSLSASVGDRVTITXRASQDISNYLNWYQQKPGKAPKLLIYYTSRLLSGVPSRFSGSGSGTDFTLTISSLQPEDFATYYXQQGDTLPYTFGGGTKVEIKRTVAAPSVFIFPPSDEQLKSGTASVVXLLNNFYPREAKVQWKVDNALQSGNSQESVTEQDSKDSTYSLSSTLTLSKADYEKHKVYAXEVTHQGLSSPVTKSFNRGEX

SEQ ID NO: 1073 - protein, 218 aa, Artificial Sequence
  Synthesized sequence with two or more selenocysteine residues substituted for two or more cysteine residues
  VARIANT (1)...(218): Xaa = selenocysteine or cysteine
DIQMTQSPSSLSASVGDRVTITXRASQSVSTSSYSYMHWYQQKPGKAPKVLISYASNLESGVPSRFSGSGSGTDFTLTISSLQPEDFATYYXQHSWGIPRTFGQGTKVEIKRTVAAPSVFIFPPSDEQLKSGTASVVXLLNNFYPREAKVQWKVDNALQSGNSQESVTEQDSKDSTYSLSSTLTLSKADYEKHKVYAXEVTHQGLSSPVTKSFNRGEX

SEQ ID NO: 1074 - protein, 218 aa, Artificial Sequence
  Synthesized sequence with two or more selenocysteine residues substituted for two or more cysteine residues
  VARIANT (1)...(218): Xaa = selenocysteine or cysteine
DIQMTQSPSSLSASVGDRVTITXKASQSVDYDGDSYMNWYQQKPGKAPKLLIYAASNLESGVPSRFSGSGSGTDFTLTISPVQAEDFATYYXQQSNEDPLTFGAGTKLELKRTVAAPSVFIFPPSDEQLKSGTASVVXLLNNFYPREAKVQWKVDNALQSGNSQESVTEQDSKDSTYSLSSTLTLSKADYEKHKVYAXEVTHQGLSSPVTKSFNRGEX

SEQ ID NO: 1075 - protein, 214 aa, Artificial Sequence
  Synthesized sequence with two or more selenocysteine residues substituted for two or more cysteine residues
  VARIANT (1)...(214): Xaa = selenocysteine or cysteine
EIVMTQSPATLSVSPGERATLSXKASQSVSNDVVWYQQKPGQAPRLLIYYASNRYTGIPARFSGSGSGTEFTLTISSLQSEDFAVYYXQQDYTSPWTFGQGTKLEIKRTVAAPSVFIFPPSDEQLKSGTASVVXLLNNFYPREAKVQWKVDNALQSGNSQESVTEQDSKDSTYSLSSTLTLSKADYEKHKVYAXEVTHQGLSSPVTKSFNRGEX

SEQ ID NO: 1076 - protein, 219 aa, Artificial Sequence
  Synthesized sequence with two or more selenocysteine residues substituted for two or more cysteine residues
  VARIANT (1)...(219): Xaa = selenocysteine or cysteine
DIQMTQSPSSLSASVGDRVTITXKSSQSLVGASGKTYLYWLFQKPGKAPKRLIYLVSTLDSGIPSRFSGSGSGTEFTLTISSLQPEDFATYYXLQGTHFPHTFGQGTKLEIKRTVAAPSVFIFPPSDEQLKSGTASVVXLLNNFYPREAKVQWKVDNALQSGNSQESVTEQDSKDSTYSLSSTLTLSKADYEKHKVYAXEVTHQGLSSPVTKSFNRGEX

SEQ ID NO: 1077 - protein, 233 aa, Artificial Sequence
  Synthesized sequence with two or more selenocysteine residues substituted for two or more cysteine residues
  VARIANT (1)...(233): Xaa = selenocysteine or cysteine
MGWSXIILFLVATATGVHSDIQLTQSPSSLSASVGDRVSITXKASQDVSIAVAWYQQKPGKAPKLLIYSASYRYTGVPDRFSGSGSGTDFTLTISSLQPEDFAVYYXQQHYITPLTFGAGTKVEIKRTVAAPSVFIFPPSDEQLKSGTASVVXLLNNFYPREAKVQWKVDNALQSGNSQESVTEQDSKDSTYSLSSTLTLSKADYEKHKVYAXEVTHQGLSSPVTKSFNRGEX

SEQ ID NO: 1078 - protein, 214 aa, Artificial Sequence
  Synthesized sequence with two or more selenocysteine residues substituted for two or more cysteine residues
  VARIANT (1)...(214): Xaa = selenocysteine or cysteine
DIQMTQSPSSLSASIGDRVTITXKASQDINSYLSWFQQKPGKAPKLLIYRANRLVDGVPSRFSGSGSGTDYTLTISSLQPEDFAVYYXLQYDEFPYTFGGGTKLEIKRTVAAPSVFIFPPSDEQLKSGTASVVXLLNNFYPREAKVQWKVDNALQSGNSQESVTEQDSKDSTYSLSSTLTLSKADYEKHKVYAXEVTHQGLSSPVTKSFNRGEX

SEQ ID NO: 1079 - protein, 214 aa, Artificial Sequence
  Synthesized sequence with two or more selenocysteine residues substituted for two or more cysteine residues
  VARIANT (1)...(214): Xaa = selenocysteine or cysteine
DIQMTQSPSSLSASVGDSVTITXQASTDISSHLNWYQQKPGKAPELLIYYGSHLLSGVPSRFSGSGSGTDFTFTISSLEAEDAATYYXGQGNRLPYTFGQGTKVEIERTVAAPSVFIFPPSDEQLKSGTASVVXLLNNFYPREAKVQWKVDNALQSGNSQESVTEQDSKDSTYSLSSTLTLSKADYEKHKVYAXEVTHQGLSSPVTKSFNRGEX

SEQ ID NO: 1080 - protein, 214 aa, Artificial Sequence
  Synthesized sequence with two or more selenocysteine residues substituted for two or more cysteine residues
  VARIANT (1)...(214): Xaa = selenocysteine or cysteine
DIQMTQSPSSVSASVGDRVTITXRASQGISSWLAWYQQKPGKAPKLLIYGASSLESGVPSRFSGSGSGTDFTLTISSLQPEDFASYYXQQANSFPYTFGQGTKLEIKRTVAAPSVFIFPPSDEQLKSGTASVVXLLNNFYPREAKVQWKVDNALQSGNSQESVTEQDSKDSTYSLSSTLTLSKADYEKHKVYAXEVTHQGLSSPVTKSFNRGEX

SEQ ID NO: 1081 - protein, 215 aa, Artificial Sequence
  Synthesized sequence with two or more selenocysteine residues substituted for two or more cysteine residues
  VARIANT (1)...(215): Xaa = selenocysteine or cysteine
EIVLTQSPGTLSLSPGERATLSXRASQSVSSSYLAWYQQKPGQAPRLLIYGASSRATGIPDRFSGSGSGTDFTLTISRLEPEDFAVYYXQQYGSSPXTFGQGTRLEIKRTVAAPSVFIFPPSDEQLKSGTASVVXLLNNFYPREAKVQWKVDNALQSGNSQESVTEQDSKDSTYSLSSTLTLSKADYEKHKVYAXEVTHQGLSSPVTKSFNRGEX

SEQ ID NO: 1082 - protein, 217 aa, Artificial Sequence
  Synthesized sequence with two or more selenocysteine residues substituted for two or more cysteine residues
  VARIANT (1)...(217): Xaa = selenocysteine or cysteine
QSALTQPASVSGSPGQSITISXTGTSSDVGSYNVVSWYQQHPGKAPKLIIYEVSQRPSGVSNRFSGSKSGNTASLTISGLQTEDEADYYXXSYAGSSIFVIFGGGTKVTVLGQPKAAPSVTLFPPSSEELQANKATLVXLVSDFYPGAVTVAWKADGSPVKVGVETTKPSKQSNNKYAASSYLSLTPEQWKSHRSYSXRVTHEGSTVEKTVAPAEXS

SEQ ID NO: 1083 - protein, 220 aa, Artificial Sequence
  Synthesized sequence with two or more selenocysteine residues substituted for two or more cysteine residues
  VARIANT (1)...(220): Xaa = selenocysteine or cysteine
DIVLSQSPSSLVVSVGEKVTMSXKSSQSLLYSRNQKNYLAWYQQKPGQSPKVLIYWASTRESGVPDRLTGSGSGTDFTLTISSVKAEDLAVYYXQQYYSYPLTFGAGTKLELKRTVAAPSVFIFPPSDEQLKSGTASVVXLLNNFYPREAKVQWKVDNALQSGNSQESVTEQDSKDSTYSLSSTLTLSKADYEKHKVYAXEVTHQGLSSPVTKSFNRGEX

SEQ ID NO: 1084 - protein, 215 aa, Artificial Sequence
  Synthesized sequence with two or more selenocysteine residues substituted for two or more cysteine residues
  VARIANT (1)...(215): Xaa = selenocysteine or cysteine
EIVLTQSPGTLSLSPGERATLSXRASQSVSSTYLAWYQQKPGQAPRLLIYGASSRATGIPDRFSGSGSGTDFTLTISRLEPEDFAVYYXQQYGSSPRTFGQGTKVEIKRTVAAPSVFIFPPSDEQLKSGTASVVXLLNNFYPREAKVQWKVDNALQSGNSQESVTEQDSKDSTYSLSSTLTLSKADYEKHKVYAXEVTHQGLSSPVTKSFNRGEX

SEQ ID NO: 1085 - protein, 213 aa, Artificial Sequence
  Synthesized sequence with two or more selenocysteine residues substituted for two or more cysteine residues
  VARIANT (1)...(213): Xaa = selenocysteine or cysteine
QIVLIQSPAIMSASPGEKVTMTXSASSSVSYMYWYQQKPGSSPRLLIYDTSNLASGVPVRFSGSGSGTSYSLTISRMEAEDAATYYXQQWSGYPYTFGGGTKLEIKRTVAAPSVFIFPPSDEQLKSGTASVVXLLNNFYPREAKVQWKVDNALQSGNSQESVTEQDSKDSTYSLSSTLTLSKADYEKHKVYAXEVTHQGLSSPVTKSFNRGEX

SEQ ID NO: 1086 - protein, 219 aa, Artificial Sequence
  Synthesized sequence with two or more selenocysteine residues substituted for two or more cysteine residues
  VARIANT (1)...(219): Xaa = selenocysteine or cysteine
DIVMTQTPLSLSVTPGQPASISXRSSKSLLHSNGNTYLYWFLQKPGQSPQFLIYRMSNLASGVPDRFSGSGSGTDFTLKISRVEAEDVGVYYXMQHLEYPYTFGGGTKVEIKRTVAAPSVFIFPPSDEQLKSGTASVVXLLNNFYPREAKVQWKVDNALQSGNSQESVTEQDSKDSTYSLSSTLTLSKADYEKHKVYAXEVTHQGLSSPVTKSFNRGEX

SEQ ID NO: 1087 - protein, 213 aa, Artificial Sequence
  Synthesized sequence with two or more selenocysteine residues substituted for two or more cysteine residues
  VARIANT (1)...(213): Xaa = selenocysteine or cysteine
EIVLTQSPATLSLSPGERATLSXSASISVSYMYWYQQKPGQAPRLLIYDMSNLASGIPARFSGSGSGTDFTLTISSLEPEDFAVYYXMQWSGYPYTFGGGTKVEIKRTVAAPSVFIFPPSDEQLKSGTASVVXLLNNFYPREAKVQWKVDNALQSGNSQESVTEQDSKDSTYSLSSTLTLSKADYEKHKVYAXEVTHQGLSSPVTKSFNRGEX

SEQ ID NO: 1088 - protein, 214 aa, Artificial Sequence
  Synthesized sequence with two or more selenocysteine residues substituted for two or more cysteine residues
  VARIANT (1)...(214): Xaa = selenocysteine or cysteine
DIQMTQSPSSLSASVGDRVTITXKASDLIHNWLAWYQQKPGKAPKLLIYGATSLETGVPSRFSGSGSGTDFTLTISSLQPEDFATYYXQQYWTTPFTFGQGTKVEIKRTVAAPSVFIFPPSDEQLKSGTASVVXLLNNFYPREAKVQWKVDNALQSGNSQESVTEQDSKDSTYSLSSTLTLSKADYEKHKVYAXEVTHQGLSSPVTKSFNRGEX

SEQ ID NO: 1089 - protein, 219 aa, Artificial Sequence
  Synthesized sequence with two or more selenocysteine residues substituted for two or more cysteine residues
  VARIANT (1)...(219): Xaa = selenocysteine or cysteine
DVVMTQSPLSLPVTLGQPASISXRSSQSLIYSDGNAYLHWFLQKPGQSPRLLIYKVSNRFSGVPDRFSGSGSGTDFTLKISRVEAEDVGVYYXSQSTHVPWTFGQGTKVEIKRTVAAPSVFIFPPSDEQLKSGTASVVXLLNNFYPREAKVQWKVDNALQSGNSQESVTEQDSKDSTYSLSSTLTLSKADYEKHKVYAXEVTHQGLSSPVTKSFNRGEX

SEQ ID NO: 1090 - protein, 220 aa, Artificial Sequence
  Synthesized sequence with two or more selenocysteine residues substituted for two or more cysteine residues
  VARIANT (1)...(220): Xaa = selenocysteine or cysteine
DIQMTQRPDSLSASVGDRVTMSXKSSQSLLNSGDQKNYLTWYQQKPGQPPKLLIYWASTGESGVPDRFSGSGSGTDFTFTISSLQPEDIATYYXQNDYSYPWTFGQGTKVEIKRTVAAPSVFIFPPSDEQLKSGTASVVXLLNNFYPREAKVQWKVDNALQSGNSQESVTEQDSKDSTYSLSSTLTLSKADYEKHKVYAXEVTHQGLSSPVTKSFNRGEX

SEQ ID NO: 1091 - protein, 214 aa, Artificial Sequence
  Synthesized sequence with two or more selenocysteine residues substituted for two or more cysteine residues
  VARIANT (1)...(214): Xaa = selenocysteine or cysteine
EIVLTQSPATLSLSPGERATLSXRASQSVSRYLAWYQQKPGQAPRLLIYDASNRATGIPARFSGSGSGTDSTLTISSLEPEDFAVYYXQQRSNWPRTFGQGTKVEIKRTVAAPSVFIFPPSDEQLKSGTASVVXLLNNFYPREAKVQWKVDNALQSGNSQESVTEQDSKDSTYSLSNTLTLSKADYEKHKVYAXEVTHQGLSSPVTKSFNRGEX

SEQ ID NO: 1092 - protein, 214 aa, Artificial Sequence
  Synthesized sequence with two or more selenocysteine residues substituted for two or more cysteine residues
  VARIANT (1)...(214): Xaa = selenocysteine or cysteine
DIQMTQTPSTLSASVGDRVTISXRASQDINNYLNWYQQKPGKAPKLLIYYTSTLHSGVPSRFSGSGSGTDYTLTISSLQPDDFATYFXQQGNTLPWTFGQGTKVEVKRTVAAPSVFIFPPSDEQLKSGTASVVXLLNNFYPREAKVQWKVDNALQSGNSQESVTEQDSKDSTYSLSSTLTLSKADYEKHKVYAXEVTHQGLSSPVTKSFNRGEX

SEQ ID NO: 1093 - protein, 214 aa, Artificial Sequence
  Synthesized sequence with two or more selenocysteine residues substituted for two or more cysteine residues
  VARIANT (1)...(214): Xaa = selenocysteine or cysteine
DIQMTQSPSSLSASVGDRVTITXRASQSISNNLNWYQQKPGKAPKLLIYYTSRFHSGVPSRFSGSGSGTDFTFTISSLQPEDIATYYXQQEHTLPYTFGQGTKLEIKRTVAAPSVFIFPPSDEQLKSGTASVVXLLNNFYPREAKVQWKVDNALQSGNSQESVTEQDSKDSTYSLSSTLTLSKADYEKHKVYAXEVTHQGLSSPVTKSFNRGEX

SEQ ID NO: 1094 - protein, 215 aa, Artificial Sequence
  Synthesized sequence with two or more selenocysteine residues substituted for two or more cysteine residues
  VARIANT (1)...(215): Xaa = selenocysteine or cysteine
DIVLTQSPATLSLSPGERATLSXRASQSVRSNYLAWYQQKPGQAPRLLIYGASSRATGVPARFSGSGSGTDFTLTISSLEPEDFAVYYXQQYSNFPITFGQGTKVEIKRTVAAPSVFIFPPSDEQLKSGTASVVXLLNNFYPREAKVQWKVDNALQSGNSQESVTEQDSKDSTYSLSSTLTLSKADYEKHKVYAXEVTHQGLSSPVTKSFNRGEX

SEQ ID NO: 1095 - protein, 214 aa, Artificial Sequence
  Synthesized sequence with two or more selenocysteine residues substituted for two or more cysteine residues
  VARIANT (1)...(214): Xaa = selenocysteine or cysteine
DIQMTQSPSSLSASVGDRVTITXRASQDISNYLNWYQQKPGKAPKLLIYYTSKLHSGVPSRFSGSGSGTDYTLTISSLQPEDFATYYXQQGSALPWTFGQGTKVEIKRTVAAPSVFIFPPSDEQLKSGTASVVXLLNNFYPREAKVQWKVDNALQSGNSQESVTEQDSKDSTYSLSSTLTLSKADYEKHKVYAXEVTHQGLSSPVTKSFNRGEX

SEQ ID NO: 1096 - protein, 218 aa, Artificial Sequence
  Synthesized sequence with two or more selenocysteine residues substituted for two or more cysteine residues
  VARIANT (1)...(218): Xaa = selenocysteine or cysteine
DIVMTQSPDSLAVSLGERATINXKSSESVDSYANSFLHWYQQKPGQPPKLLIYRASTRESGVPDRFSGSGSGTDFTLTISSLQAEDVAVYYXQQSKEDPLTFGGGTKVEIKRTVAAPSVFIFPPSDEQLKSGTASVVXLLNNFYPREAKVQWKVDNALQSGNSQESVTEQDSKDSTYSLSSTLTLSKADYEKHKVYAXEVTHQGLSSPVTKSFNRGEX

SEQ ID NO: 1097 - protein, 219 aa, Artificial Sequence
  Synthesized sequence with two or more selenocysteine residues substituted for two or more cysteine residues
  VARIANT (1)...(219): Xaa = selenocysteine or cysteine
DIVMTQAAPSVPVTPGESVSISXRSSKSLLHSNGNTYLYWFLQRPGQSPQLLIYRMSNLASGVPDRFSGSGSGTAFTLRISRVEAEDVGVYYXMQHLEYPLTFGAGTKLELKRADAAPTVSIFPPSSEQLTSGGASVVXFLNNFYPKDINVKWKIDGSERQNGVLNSWTDQDSKDSTYSMSSTLTLTKDEYERHNSYTXEATHKTSTSPIVKSFNRNEX

SEQ ID NO: 1098 - protein, 213 aa, Artificial Sequence
  Synthesized sequence with two or more selenocysteine residues substituted for two or more cysteine residues
  VARIANT (1)...(213): Xaa = selenocysteine or cysteine
DIQMTQSPSSLSASVGDRVTITXSASSSVSYMNWYQQTPGKAPKRWIYDTSKLASGVPSRFSGSGSGTDYTFTISSLQPEDIATYYXQQWSSNPFTFGQGTKLQITRTVAAPSVFIFPPSDEQLKSGTASVVXLLNNFYPREAKVQWKVDNALQSGNSQESVTEQDSKDSTYSLSSTLTLSKADYEKHKVYAXEVTHQGLSSPVTKSFNRGEX

SEQ ID NO: 1099 - protein, 215 aa, Artificial Sequence
  Synthesized sequence with two or more selenocysteine residues substituted for two or more cysteine residues
  VARIANT (1)...(215): Xaa = selenocysteine or cysteine
EIVLTQSPATLSLSPGERATLSXRASQSVSSYLAWYQQKPGQAPRLLIYDASKRATGIPARFSGSGSGTDFTLTISSLEPEDFAVYYXQQRSKWPPWTFGQGTKVESKRTVAAPSVFIFPPSDEQLKSGTASVVXLLNNFYPREAKVQWKVDNALQSGNSQESVTEQDSKDSTYSLSSTLTLSKADYEKHKVYAXEVTHQGLSSPVTKSFNRGEX

SEQ ID NO: 1100 - protein, 214 aa, Artificial Sequence
  Synthesized sequence with two or more selenocysteine residues substituted for two or more cysteine residues
  VARIANT (1)...(214): Xaa = selenocysteine or cysteine
SYELTQPLSVSVALGQTARITXSGDSIPNYYVYWYQQKPGQAPVLVIYDDSNRPSGIPERFSGSNSGNTATLTISRAQAGDEADYYXQSFDSSLNAEVFGGGTKLTVLGQPKAAPSVTLFPPSSEELQANKATLVXLISDFYPGAVTVAWKADSSPVKAGVETTTPSKQSNNKYAASSYLSLTPEQWKSHRSYSXQVTHEGSTVEKTVAPTEXS

SEQ ID NO: 1101 - protein, 214 aa, Artificial Sequence
  Synthesized sequence with two or more selenocysteine residues substituted for two or more cysteine residues
  VARIANT (1)...(214): Xaa = selenocysteine or cysteine
SYVLTQPPSVSVAPGQTARITXGGNNLGSKSVHWYQQKPGQAPVLVVYDDSDRPSWIPERFSGSNSGNTATLTISRGEAGDEADYYXQVWDSSSDHVVFGGGTKLTVLGQPKAAPSVTLFPPSSEELQANKATLVXLISDFYPGAVTVAWKADSSPVKAGVETTTPSKQSNNKYAASSYLSLTPEQWKSHRSYSXQVTHEGSTVEKTVAPTEXS

SEQ ID NO: 1102 - protein, 213 aa, Artificial Sequence
  Synthesized sequence with two or more selenocysteine residues substituted for two or more cysteine residues
  VARIANT (1)...(213): Xaa = selenocysteine or cysteine
DIQMTQSPSSLSASVGDRVTITXKASQDVGTAVAWYQQKPGKAPKLLIYWASTRHTGVPSRFSGSGSGTDFTLTISSLQPEDFATYYXQQYSSYRTFGQGTKVEIKRTVAAPSVFIFPPSDEQLKSGTASVVXLLNNFYPREAKVQWKVDNALQSGNSQESVTEQDSKDSTYSLSSTLTLSKADYEKHKVYAXEVTHQGLSSPVTKSFNRGEX

SEQ ID NO: 1103 - protein, 214 aa, Artificial Sequence
  Synthesized sequence with two or more selenocysteine residues substituted for two or more cysteine residues
  VARIANT (1)...(214): Xaa = selenocysteine or cysteine
DIQMTQSPSSLSASVGDRVTITXRTSENIYSYLAWYQQKPGKAPKLLIYNAKTLAEGVPSRFSGSGSGTDFTLTISSLQPEDFATYYXQHHYGIPFTFGQGTKVEIKRTVAAPSVFIFPPSDEQLKSGTASVVXLLNNFYPREAKVQWKVDNALQSGNSQESVTEQDSKDSTYSLSSTLTLSKADYEKHKVYAXEVTHQGLSSPVTKSFNRGEX

SEQ ID NO: 1104 - protein, 214 aa, Artificial Sequence
  Synthesized sequence with two or more selenocysteine residues substituted for two or more cysteine residues
  VARIANT (1)...(214): Xaa = selenocysteine or cysteine
DIQMTQSPPSLSASAGDRVTITXRASQGISSRLAWYQQKPEKAPKSLIYAASSLQSGVPSRFSGSGSGTDFTLTISSLQPEDFATYYXQQYNSYPYTFGQGTKLEIKRTVAAPSVFIFPPSDEQLKSGTASVVXLLNNFYPREAKVQWKVDNALQSGNSQESVTEQDSKDSTYSLSSTLTLSKADYEKHKVYAXEVTHQGLSSPVTKSFNRGEX

SEQ ID NO: 1105 - protein, 214 aa, Artificial Sequence
  Synthesized sequence with two or more selenocysteine residues substituted for two or more cysteine residues
  VARIANT (1)...(214): Xaa = selenocysteine or cysteine
DIQMTQSPSSLSASVGDRVTITXRASQDISSYLNWYQQKPGKAPKLLIYYTSRLHSGVPSRFSGSGSGTDFTFTISSLQPEDIATYYXQQGNTLPYTFGQGTKVEIKRTVAAPSVFIFPPSDEQLKSGTASVVXLLNNFYPREAKVQWKVDNALQSGNSQESVTEQDSKDSTYSLSSTLTLSKADYEKHKVYAXEVTHQGLSSPVTKSFNRGEX

SEQ ID NO: 1106 - protein, 215 aa, Artificial Sequence
  Synthesized sequence with two or more selenocysteine residues substituted for two or more cysteine residues
  VARIANT (1)...(215): Xaa = selenocysteine or cysteine
DIQMTQSPSSLSASVGDRVSITXRPSQSFSRYINWYQQKPGKAPKLLIHAASSLVGGVPSRFSGSGSGTDFTLTISSLQPEDFATYYXQQTYSNPPITFGQGTRLEMKRTVAAPSVFIFPPSDEQLKSGTASVVXLLNNFYPREAKVQWKVDNALQSGNSQESVTEQDSKDSTYSLSSTLTLSKADYEKHKVYAXEVTHQGLSSPVTKSFNRGEX

SEQ ID NO: 1107 - protein, 214 aa, Artificial Sequence
  Synthesized sequence with two or more selenocysteine residues substituted for two or more cysteine residues
  VARIANT (1)...(214): Xaa = selenocysteine or cysteine
SYVLTQPPSVSVAPGKTARITXGGNIIGSKLVHWYQQKPGQAPVLVIYDDGDRPSGIPERFSGSNSGNTATLTISRVEAGDEADYYXQVWDTGSDPVVFGGGTKLTVLGQPKAAPSVTLFPPSSEELQANKATLVXLISDFYPGAVTVAWKADSSPVKAGVETTTPSKQSNNKYAASSYLSLTPEQWKSHRSYSXQVTHEGSTVEKTVAPTEXS

SEQ ID NO: 1108 - protein, 214 aa, Artificial Sequence
  Synthesized sequence with two or more selenocysteine residues substituted for two or more cysteine residues
  VARIANT (1)...(214): Xaa = selenocysteine or cysteine
DIQMTQSPSSLSASVGDRVTITXRASQDVNTAVAWYQQKPGKAPKLLIYSASFLYSGVPSRFSGSRSGTDFTLTISSLQPEDFATYYXQQHYTTPPTFGQGTKVEIKRTVAAPSVFIFPPSDEQLKSGTASVVXLLNNFYPREAKVQWKVDNALQSGNSQESVTEQDSKDSTYSLSSTLTLSKADYEKHKVYAXEVTHQGLSSPVTKSFNRGEX

SEQ ID NO: 1109 - protein, 214 aa, Artificial Sequence; identical to SEQ ID NO: 1108
  Synthesized sequence with two or more selenocysteine residues substituted for two or more cysteine residues
  VARIANT (1)...(214): Xaa = selenocysteine or cysteine

SEQ ID NO: 1110 - protein, 218 aa, Artificial Sequence
  Synthesized sequence with two or more selenocysteine residues substituted for two or more cysteine residues
  VARIANT (1)...(218): Xaa = selenocysteine or cysteine
DIVMTQSPDSLAVSLGERATINXRASKSVSTSGYSYIYWYQQKPGQPPKLLIYLASILESGVPDRFSGSGSGTDFTLTISSLQAEDVAVYYXQHSRELPWTFGQGTKVEIKRTVAAPSVFIFPPSDEQLKSGTASVVXLLNNFYPREAKVQWKVDNALQSGNSQESVTEQDSKDSTYSLSSTLTLSKADYEKHKVYAXEVTHQGLSSPVTKSFNRGEX

SEQ ID NO: 1111 - protein, 214 aa, Artificial Sequence
  Synthesized sequence with two or more selenocysteine residues substituted for two or more cysteine residues
  VARIANT (1)...(214): Xaa = selenocysteine or cysteine
DIQMTQSPSSLSASVGDRVTITXRASQSINSYLDWYQQKPGKAPKLLIYAASSLQSGVPSRFSGSGSGTDFTLTISSLQPEDFATYYXQQYYSTPFTFGPGTKVEIKRTVAAPSVFIFPPSDEQLKSGTASVVXLLNNFYPREAKVQWKVDNALQSGNSQESVTEQDSKDSTYSLSSTLTLSKADYEKHKVYAXEVTHQGLSSPVTKSFNRGEX

SEQ ID NO: 1112 - protein, 214 aa, Artificial Sequence
  Synthesized sequence with two or more selenocysteine residues substituted for two or more cysteine residues
  VARIANT (1)...(214): Xaa = selenocysteine or cysteine
DIQMTQSPASLSASVGDRVTITXRASQDISDYLAWYQQKPGKIPRLLIYTTSTLQSGVPSRFRGSGSGTDFTLTISSLQPEDVATYYXQKYDSAPLTFGGGTKVEIKRTVAAPSVFIFPPSDEQLKSGTASVVXLLNNFYPREAKVQWKVDNALQSGNSQESVTEQDSKDSTYSLSSTLTLSKADYEKHKVYAXEVTHQGLSSPVTKSFNRGEX

SEQ ID NO: 1113 - protein, 213 aa, Artificial Sequence
  Synthesized sequence with two or more selenocysteine residues substituted for two or more cysteine residues
  VARIANT (1)...(213): Xaa = selenocysteine or cysteine
QIVLSQSPAILSASPGEKVTMTXRASSSVSYMHWYQQKPGSSPKPWIYATSNLASGVPARFSGSGSGTSYSFTISRVEAEDAATYYXQQWTFNPPTFGGGTRLEIKRTVAAPSVFIFPPSDEQLKSGTASVVXLLNNFYPREAKVQWKVDNALQSGNSQESVTEQDSKDSTYSLSSTLTLSKADYEKHKVYAXEVTHQGLSSPVTKSFNRGEX

SEQ ID NO: 1114 - protein, 214 aa, Artificial Sequence
  Synthesized sequence with two or more selenocysteine residues substituted for two or more cysteine residues
  VARIANT (1)...(214): Xaa = selenocysteine or cysteine
DIQMTQSPSSLSASVGDRVTITXRASQGISSWLAWYQQKPEKAPKSLIYAASSLQSGVPSRFSGSGSGTDFTLTISSLQPEDFVTYYXQQYNSYPRTFGQGTKVEIKRTVAAPSVFIFPPSDEQLKSGTASVVXLLNNFYPREAKVQWKVDNALQSGNSQESVTEQDSKDSTYSLSSTLTLSKADYEKHKVYAXEVTHQGLSSPVTKSFNRGEX

SEQ ID NO: 1115 - protein, 216 aa, Artificial Sequence
  Synthesized sequence with two or more selenocysteine residues substituted for two or more cysteine residues
  VARIANT (1)...(216): Xaa = selenocysteine or cysteine
EIVLTQSPATLSLSPGERATLSXRASQSVSSYLAWYQQKPGQAPRLLIYDASNRATGIPARFSGSGSGTDFTLTISSLEPEDFAVYYXQQRSNWPPALTFXGGTKVEIKRTVAAPSVFIFPPSDEQLKSGTASVVXLLNNFYPREAKVQWKVDNALQSGNSQESVTEQDSKDSTYSLSSTLTLSKADYEKHKVYAXEVTHQGLSSPVTKSFNRGEX

SEQ ID NO: 1116 - protein, 214 aa, Artificial Sequence
  Synthesized sequence with two or more selenocysteine residues substituted for two or more cysteine residues
  VARIANT (1)...(214): Xaa = selenocysteine or cysteine
DIQMTQSPSSLSASVGDRVTITXRASQGISSWLAWYQQKPEKAPKSLIYAASSLQSGVPSRFSGSGSGTDFTLTISSLQPEDFATYYXQQYNIYPYTFGQGTKLEIKRTVAAPSVFIFPPSDEQLKSGTASVVXLLNNFYPREAKVQWKVDNALQSGNSQESVTEQDSKDSTYSLSSTLTLSKADYEKHKVYAXEVTHQGLSSPVTKSFNRGEX

SEQ ID NO: 1117 - protein, 214 aa, Artificial Sequence
  Synthesized sequence with two or more selenocysteine residues substituted for two or more cysteine residues
  VARIANT (1)...(214): Xaa = selenocysteine or cysteine
SYELTQPPSVSVSPGQTASITXSGDNIGDQYAHWYQQKPGQSPVLVIYQDKNRPSGIPERFSGSNSGNTATLTISGTQAMDEADYYXATYTGFGSLAVFGGGTKLTVLGQPKAAPSVTLFPPSSEELQANKATLVXLISDFYPGAVTVAWKADSSPVKAGVETTTPSKQSNNKYAASSYLSLTPEQWKSHRSYSXQVTHEGSTVEKTVAPTEXS

SEQ ID NO: 1118 - protein, 214 aa, Artificial Sequence
  Synthesized sequence with two or more selenocysteine residues substituted for two or more cysteine residues
  VARIANT (1)...(214): Xaa = selenocysteine or cysteine
DIQMTQSPSSLSASVGDRVTINXKASQDINSYLSWFQQKPGKAPKTLIYRANRLVDGVPSRFSGSGSGQDYTLTISSLQPEDFATYYXLQYDEFPLTFGGGTKVEIKRTVAAPSVFIFPPSDEQLKSGTASVVXLLNNFYPREAKVQWKVDNALQSGNSQESVTEQDSKDSTYSLSSTLTLSKADYEKHKVYAXEVTHQGLSSPVTKSFNRGEX

SEQ ID NO: 1119 - protein, 220 aa, Artificial Sequence
  Synthesized sequence with two or more selenocysteine residues substituted for two or more cysteine residues
  VARIANT (1)...(220): Xaa = selenocysteine or cysteine
DIQMTQSPSSLSASVGDRVTITXKSSQSLLYRSNQKNYLAWYQQKPGKAPKLLIYWASTRESGVPSRFSGSGSGTDFTLTISSLQPEDFATYYXQQYYNYPRTFGQGTKVEIKRTVAAPSVFIFPPSDEQLKSGTASVVXLLNNFYPREAKVQWKVDNALQSGNSQESVTEQDSKDSTYSLSSTLTLSKADYEKHKVYAXEVTHQGLSSPVTKSFNRGEX

SEQ ID NO: 1120 - protein, 213 aa, Artificial Sequence
  Synthesized sequence with two or more selenocysteine residues substituted for two or more cysteine residues
  VARIANT (1)...(213): Xaa = selenocysteine or cysteine
DIELTQPPSVSVAPGQTARISXSGDNIGSFYVHWYQQKPGQAPVLVIYDKSNRPSGIPERFSGSNSGNTATLTISGTQAEDEADYYXQSYANTLSLVFGGGTKLTVLGQPKAAPSVTLFPPSSEELQANKATLVXLISDFYPGAVTVAWKADSSPVKAGVETTTPSKQSNNKYAASSYLSLTPEQWKSHRSYSXQVTHEGSTVEKTVAPTEXS

SEQ ID NO: 1121 - protein, 213 aa, Artificial Sequence
  Synthesized sequence with two or more selenocysteine residues substituted for two or more cysteine residues
  VARIANT (1)...(213): Xaa = selenocysteine or cysteine
QPGLTQPPSVSVAPGQTARITXGGNNIGSKSVHWYQQKPGQAPVLVVYDDSDRPSGIPERFSGSNSGNTATLTISRVEAGDEADYYXQVWDSSSDHYVFGTGTKVTVLSSASTKGPSVFPLAPSSKSTSGGTAALGXLVKDYFPEPVTVSWNSGALTSGVHTFPAVLQSSGLYSLSSVVTVPSSSLGTQTYIXNVNHKPSNTKVDKKVEPKSX

SEQ ID NO: 1122 - protein, 214 aa, Artificial Sequence
  Synthesized sequence with two or more selenocysteine residues substituted for two or more cysteine residues
  VARIANT (1)...(214): Xaa = selenocysteine or cysteine
DIQMTQSPSSLSASVGDRVTITXRASQGISRWLAWYQQKPEKAPKSLIYAASSLQSGVPSRFSGSGSGTDFTLTISSLQPEDFATYYXQQYNTYPRTFGQGTKVEIKRTVAAPSVFIFPPSDEQLKSGTASVVXLLNNFYPREAKVQWKVDNALQSGNSQESVTEQDSKDSTYSLSSTLTLSKADYEKHKVYAXEVTHQGLSSPVTKSFNRGEX

SEQ ID NO: 1123 - protein, 213 aa, Artificial Sequence
  Synthesized sequence with two or more selenocysteine residues substituted for two or more cysteine residues
  VARIANT (1)...(213): Xaa = selenocysteine or cysteine
DFVMTQSPAFLSVTPGEKVTITXSAQSSVNYIHWYQQKPDQAPKKLIYDTSKLASGVPSRFSGSGSGTDYTFTISSLEAEDAATYYXQQWTTNPLTFGQGTKVEIKRTVAAPSVFIFPPSDEQLKSGTASVVXLLNNFYPREAKVQWKVDNALQSGNSQESVTEQDSKDSTYSLSSTLTLSKADYEKHKVYAXEVTHQGLSSPVTKSFNRGEX

SEQ ID NO: 1124 - protein, 219 aa, Artificial Sequence
  Synthesized sequence with two or more selenocysteine residues substituted for two or more cysteine residues
  VARIANT (1)...(219): Xaa = selenocysteine or cysteine
DVVMTQSPLSLPVTPGEPASISXRSSQSLAKSYGNTYLSWYLQKPGQSPQLLIYGISNRFSGVPDRFSGSGSGTDFTLKISRVEAEDVGVYYXLQGTHQPYTFGQGTKVEIKRTVAAPSVFIFPPSDEQLKSGTASVVXLLNNFYPREAKVQWKVDNALQSGNSQESVTEQDSKDSTYSLSSTLTLSKADYEKHKVYAXEVTHQGLSSPVTKSFNRGEX

SEQ ID NO: 1125 - protein, 213 aa, Artificial Sequence
  Synthesized sequence with two or more selenocysteine residues substituted for two or more cysteine residues
  VARIANT (1)...(213): Xaa = selenocysteine or cysteine
DIQLTQSPSSLSASVGDRVTMTXRASSSVSYIHWFQQKPGKAPKPWIYATSNLASGVPVRFSGSGSGTDYTFTISSLQPEDIATYYXQQWTSNPPTFGGGTKLEIKRTVAAPSVFIFPPSDEQLKSGTASVVXLLNNFYPREAKVQWKVDNALQSGNSQESVTEQDSKDSTYSLSSTLTLSKADYEKHKVYAXEVTHQGLSSPVTKSFNRGEX

SEQ ID NO: 1126 - protein, 214 aa, Artificial Sequence
  Synthesized sequence with two or more selenocysteine residues substituted for two or more cysteine residues
  VARIANT (1)...(214): Xaa = selenocysteine or cysteine
DIQMTQSPSSLSASVGDRVTITXRASQYFSSYLAWYQQKPGKAPKLLIYGASSRASGVPSRFSGSGSGTDFTLTISSLQPEDFATYYXQQYLGSPPTFGQGTKVEIKRTVAAPSVFIFPPSDEQLKSGTASVVXLLNNFYPREAKVQWKVDNALQSGNSQESVTEQDSKDSTYSLSSTLTLSKADYEKHKVYAXEVTHQGLSSPVTKSFNRGEX

SEQ ID NO: 1127 - protein, 213 aa, Artificial Sequence
  Synthesized sequence with two or more selenocysteine residues substituted for two or more cysteine residues
  VARIANT (1)...(213): Xaa = selenocysteine or cysteine
DIQMTQSPSSLSASVGDRVTITXSASSSVSYMNWYQQKPGKAPKRLIYDTSKLASGVPSRFSGSGSGTDFTLTISSLQPEDFATYYXQQWSSNPPTFGGGTKVEIKRTVAAPSVFIFPPSDEQLKSGTASVVXLLNNFYPREAKVQWKVDNALQSGNSQESVTEQDSKDSTYSLSSTLTLSKADYEKHKVYAXEVTHQGLSSPVTKSFNRGEX

SEQ ID NO: 1128 - protein, 215 aa, Artificial Sequence
  Synthesized sequence with two or more selenocysteine residues substituted for two or more cysteine residues
  VARIANT (1)...(215): Xaa = selenocysteine or cysteine
QIVLTQSPAIMSASLGERVTMTXTASSSVSSNYLHWYQQKPGSAPNLWIYSTSNLASGVPARFSGSGSGTSYSLTISSMEAEDAATYYXHQYLRSPPTFGGGTKLEIKRTVAAPSVFIFPPSDEQLKSGTASVVXLLNNFYPREAKVQWKVDNALQSGNSQESVTEQDSKDSTYSLSSTLTLSKADYEKHKVYAXEVTHQGLSSPVTKSFNRGEX

SEQ ID NO: 1129 - protein, 218 aa, Artificial Sequence
  Synthesized sequence with two or more selenocysteine residues substituted for two or more cysteine residues
  VARIANT (1)...(218): Xaa = selenocysteine or cysteine
DIVMTQSPDSLAVSLGERATINXRASKSVSTSGYSFMHWYQQKPGQPPKLLIYLASNLESGVPDRFSGSGSGTDFTLTISSLQAEDVAVYYXQHSREVPWTFGQGTKVEIKRTVAAPSVFIFPPSDEQLKSGTASVVXLLNNFYPREAKVQWKVDNALQSGNSQESVTEQDSKDSTYSLSSTLTLSKADYEKHKVYAXEVTHQGLSSPVTKSFNRGEX

SEQ ID NO: 1130 - protein, 216 aa, Artificial Sequence; identical to SEQ ID NO: 949
  Synthesized sequence with two or more selenocysteine residues substituted for two or more cysteine residues
  VARIANT (1)...(216): Xaa = selenocysteine or cysteine

SEQ ID NO: 1131 - protein, 219 aa, Artificial Sequence
  Synthesized sequence with two or more selenocysteine residues substituted for two or more cysteine residues
  VARIANT (1)...(219): Xaa = selenocysteine or cysteine
DIVMTQAAFSNPVTLGTSASISXRSSKSLLHSNGITYLYWYLQKPGQSPQLLIYQMSNLASGVPDRFSSSGSGTDFTLRISRVEAEDVGVYYXAQNLELPYTFGGGTKLEIKRTVAAPSVFIFPPSDEQLKSGTASVVXLLNNFYPREAKVQWKVDNALQSGNSQESVTEQDSKDSTYSLSSTLTLSKADYEKHKVYAXEVTHQGLSSPVTKSFNRGEX

SEQ ID NO: 1132 - protein, 192 aa, Artificial Sequence
  Synthesized sequence with two or more selenocysteine residues substituted for two or more cysteine residues
  VARIANT (1)...(192): Xaa = selenocysteine or cysteine
MFPTIPLSRLFDNAMLRAHRLHQLAFDTYQEFEEAYIPKEQKYSFLQNPQTSLXFSESIPTPSNREETQQKSNLELLRISLLLIQSWLEPVQFLRSVFANSLVYGASDSNVYDLLKDLEEGIQTLMGRLEDGSPRTGQIFKQTYSKFDTNSHNDDALLKNYGLLYXFRKDMDKVETFLRIVQXRSVEGSXGF

SEQ ID NO: 1133 - protein, 217 aa, Artificial Sequence
  Synthesized sequence with two or more selenocysteine residues substituted for two or more cysteine residues
  VARIANT (1)...(217): Xaa = selenocysteine or cysteine
MATGSRTSLLLAFGLLCLPWLQEGSAFPTIPLSRLFDNAMLRAHRLHQLAFDTYQEFEEAYIPKEQKYSFLQNPQTSLXFSESIPTPSNREETQQKSNLELLRISLLLIQSWLEPVQFLRSVFANSLVYGASDSNVYDLLKDLEEGIQTLMGRLEDGSPRTGQIFKQTYSKFDTNSHNDDALLKNYGLLYXFRKDMDKVETFLRIVQXRSVEGSXGF

SEQ ID NO: 1134 - protein, 147 aa, Artificial Sequence
  Synthesized sequence with two or more selenocysteine residues substituted for two or more cysteine residues
  VARIANT (1)...(147): Xaa = selenocysteine or cysteine
MVPIQKVQDDTKTLIKTIVTRINDISHTQSVSSKQKVTGLDFIPGLHPILTLSKMDQTLAVYQQILTSMPSRNVIQISNDLENLRDLLHVLAFSKSXHLPWASGLETLDSLGGVLEASGYSTEVVALSRLQGSLQDMLWQLDLSPGX

SEQ ID NO: 1135 - protein, 167 aa, Artificial Sequence
  Synthesized sequence with two or more selenocysteine residues substituted for two or more cysteine residues
  VARIANT (1)...(167): Xaa = selenocysteine or cysteine
MAPPRLIXDSRVLERYLLEAKEAENITTGXAEHXSLNENITVPDTKVNFYAWKRMEVGQQAVEVWQGLALLSEAVLRGQALLVNSSQPWEPLQLHVDKAVSGLRSLTTLLRALGAQKEAISPPDAASAAPLRTITADTFRKLFRVYSNFLRGKLKLYTGEAXRTGDR

SEQ ID NO: 1136 - protein, 166 aa, Artificial Sequence
  Synthesized sequence with two or more selenocysteine residues substituted for two or more cysteine residues
  VARIANT (1)...(166): Xaa = selenocysteine or cysteine
APPRLIXDSRVLERYLLEAKEAENITTGXAEHXSLNENITVPDTKVNFYAWKRMEVGQQAVEVWQGLALLSEAVLRGQALLVNSSQPWEPLQLHVDKAVSGLRSLTTLLRALGAQKEAISPPDAASAAPLRTITADTFRKLFRVYSNFLRGKLKLYTGEAXRTGDR

SEQ ID NO: 1137 - protein, 166 aa, Artificial Sequence; identical to SEQ ID NO: 1136
  Synthesized sequence with two or more selenocysteine residues substituted for two or more cysteine residues
  VARIANT (1)...(166): Xaa = selenocysteine or cysteine

SEQ ID NO: 1138 - protein, 165 aa, Artificial Sequence
  Synthesized sequence with two or more selenocysteine residues substituted for two or more cysteine residues
  VARIANT (1)...(165): Xaa = selenocysteine or cysteine
APPRLIXDSRVLERYLLEAKEAENITTGXAEHXSLNENITVPDTKVNFYAWKRMEVGQQAVEVWQGLALLSEAVLRGQALLVNSSQPWEPLQLHVDKAVSGLRSLTTLLRALGAQKEAISPPDAASAAPLRTITADTFRKLFRVYSNFLRGKLKLYTGEAXRTGD

SEQ ID NO: 1139 - protein, 407 aa, Artificial Sequence
  Synthesized sequence with two or more selenocysteine residues substituted for two or more cysteine residues
  VARIANT (1)...(407): Xaa = selenocysteine or cysteine
MVLAAPLLLGFLLLALELRPRGEAAEGPAAAAAAAAAAAAAGVGGERSSRPAPSVAPEPDGCPVCVWRQHSRELRLESIKSQILSKLRLKEAPNISREVVKQLLPKAPPLQQILDLHDFQGDALQPEDFLEEDEYHATTETVISMAQETDPAVQTDGSPLCCHFHFSPKVMFTKVLKAQLWVYLRPVPRPATVYLQILRLKPLTGEGTAGGGGGGRRHIRIRSLKIELHSRSGHWQSIDFKQVLHSWFRQPQSNWGIEINAFDPSGTDLAVTSLGPGAEGLHPFMELRVLENTKRSRRNLGLDCDEHSSESRXCRYPLTVDFEAFGWDWIIAPKRYKANYXSGQXEYMFMQKYPHTHLVQQANPRGSAGPXXTPTKMSPINMLYFNDKQQIIYGKIPGMVVDRXGXS

SEQ ID NO: 1140 - protein, 140 aa, Artificial Sequence
  Synthesized sequence with two or more selenocysteine residues substituted for two or more cysteine residues
  VARIANT (1)...(140): Xaa = selenocysteine or cysteine
MNLPPGNYKKPKLLYCSNGGHFLRILPDGTVDGTRDRSDQHIQLQLSAESVGEVYIKSTETGQYLXMDTDGLLYGSQTPNEEXLFLERLEENHYNTYISKKHAEKNWFVGLKKNGSCKRGPRTHYGQKAILFLPLPVSSD

SEQ ID NO: 1141 - protein, 146 aa, Artificial Sequence
  Synthesized sequence with two or more selenocysteine residues substituted for two or more cysteine residues
  VARIANT (1)...(146): Xaa = selenocysteine or cysteine
MALPEDGGSGAFPPGHFKDPKRLYCKNGGFFLRIHPDGRVDGVREKSDPHIKLQLQAEERGVVSIKGVSANRYLAMKEDGXLLASKSVTDECFFFERLEXNNYNTYRSRKYTSWYVALKRTGQYKLGSKTGPGQKAILFLPMSAKS

SEQ ID NO: 1142 - protein, 21 aa, Artificial Sequence
  Synthesized sequence with two or more selenocysteine residues substituted for two or more cysteine residues
  VARIANT (1)...(21): Xaa = selenocysteine or cysteine
GIVEQXXTSIXSLYQLENYXG

SEQ ID NO: 1143 - protein, 32 aa, Artificial Sequence
  Synthesized sequence with two or more selenocysteine residues substituted for two or more cysteine residues
  VARIANT (1)...(32): Xaa = selenocysteine or cysteine
FVNQHLXGSHLVEALYLVXGERGFFYTPKTRR

SEQ ID NO: 1144 - protein, 21 aa, Artificial Sequence
  Synthesized sequence with two or more selenocysteine residues substituted for two or more cysteine residues
  VARIANT (1)...(21): Xaa = selenocysteine or cysteine
GIVEQXXTSIXSLYQLENYXN

SEQ ID NO: 1145 - protein, 30 aa, Artificial Sequence
  Synthesized sequence with two or more selenocysteine residues substituted for two or more cysteine residues
  VARIANT (1)...(30): Xaa = selenocysteine or cysteine
FVNQHLXGSHLVEALYLVXGERGFFYTDKT

SEQ ID NO: 1146 - protein, 21 aa, Artificial Sequence
  Synthesized sequence with two or more selenocysteine residues substituted for two or more cysteine residues
  VARIANT (1)...(21): Xaa = selenocysteine or cysteine
GIVEQXXTSIXSLYQLENYXN

SEQ ID NO: 1147 - protein, 30 aa, Artificial Sequence
  Synthesized sequence with two or more selenocysteine residues substituted for two or more cysteine residues
  VARIANT (1)...(30): Xaa = selenocysteine or cysteine
FVNQHLXGSHLVEALYLVXGERGFFYTKPT

SEQ ID NO: 1148 - protein, 21 aa, Artificial Sequence
  Synthesized sequence with two or more selenocysteine residues substituted for two or more cysteine residues
  VARIANT (1)...(21): Xaa = selenocysteine or cysteine
GIVEQXXTSIXSLYQLENYXN

SEQ ID NO: 1149 - protein, 30 aa, Artificial Sequence
  Synthesized sequence with two or more selenocysteine residues substituted for two or more cysteine residues
  VARIANT (1)...(30): Xaa = selenocysteine or cysteine
FVNQHLXGSHLVEALYLVXGERGFFYTPKT

SEQ ID NO: 1150 - protein, 21 aa, Artificial Sequence
  Synthesized sequence with two or more selenocysteine residues substituted for two or more cysteine residues
  VARIANT (1)...(21): Xaa = selenocysteine or cysteine
GIVEQXXTSIXSLYQLENYXN

SEQ ID NO: 1151 - protein, 29 aa, Artificial Sequence
  Synthesized sequence with two or more selenocysteine residues substituted for two or more cysteine residues
  VARIANT (1)...(29): Xaa = selenocysteine or cysteine
FVNQHLXGSHLVEALYLVXGERGFFYTPK

SEQ ID NO: 1152 - protein, 21 aa, Artificial Sequence
  Synthesized sequence with two or more selenocysteine residues substituted for two or more cysteine residues
  VARIANT (1)...(21): Xaa = selenocysteine or cysteine
GIVEQXXTSIXSLYQLENYXN

SEQ ID NO: 1153 - protein, 30 aa, Artificial Sequence
  Synthesized sequence with two or more selenocysteine residues substituted for two or more cysteine residues
  VARIANT (1)...(30): Xaa = selenocysteine or cysteine
FVKQHLXGSHLVEALYLVXGERGFFYTPET

SEQ ID NO: 1154 - protein, 21 aa, Artificial Sequence
  Synthesized sequence with two or more selenocysteine residues substituted for two or more cysteine residues
  VARIANT (1)...(21): Xaa = selenocysteine or cysteine
GIVEQXXTSIXSLYQLENYXN

SEQ ID NO: 1155 - protein, 29 aa, Artificial Sequence
  Synthesized sequence with two or more selenocysteine residues substituted for two or more cysteine residues
  VARIANT (1)...(29): Xaa = selenocysteine or cysteine
FVNQHLXGSHLVEALYLVXGERGFFYTPK

SEQ ID NO: 1156 - protein, 189 aa, Artificial Sequence
  Synthesized sequence with two or more selenocysteine residues substituted for two or more cysteine residues
  VARIANT (1)...(189): Xaa = selenocysteine or cysteine
MASPFALLMVLVVLSCKSSCSLGXDLPETHSLDNRRTLMLLAQMSRISPSSXLMDRHDFGFPQEEFDGNQFQKAPAISVLHELIQQIFNLFTTKDSSAAWDEDLLDKFCTELYQQLNDLEAXVMQEERVGETPLMNADSILAVKKYFRRITLYLTEKKYSPXAWEVVRAEIMRSLSLSTNLQERLRRKE

SEQ ID NO: 1157 - protein, 166 aa, Artificial Sequence
  Synthesized sequence with two or more selenocysteine residues substituted for two or more cysteine residues
  VARIANT (1)...(166): Xaa = selenocysteine or cysteine
XDLPETHSLDNRRTLMLLAQMSRISPSSXLMDRHDFGFPQEEFDGNQFQKAPAISVLHELIQQIFNLFTTKDSSAAWDEDLLDKFCTELYQQLNDLEAXVMQEERVGETPLMNADSILAVKKYFRRITLYLTEKKYSPXAWEVVRAEIMRSLSLSTNLQERLRRKE

SEQ ID NO: 1158 - protein, 165 aa, Artificial Sequence
  Synthesized sequence with two or more selenocysteine residues substituted for two or more cysteine residues
  VARIANT (1)...(165): Xaa = selenocysteine or cysteine
XDLPQTHSLGSRRTLMLLAQMRKISLFSXLKDRHDFGFPQEEFGNQFQKAETIPVLHEMIQQIFNLFSTKDSSAAWDETLLDKFYTELYQQLNDLEAXVIQGVGVTETPLMKEDSILAVRKYFQRITLYLKEKKYSPXAWEVVRAEIMRSFSLSTNLQESLRSKE

SEQ ID NO: 1159 - protein, 166 aa, Artificial Sequence
  Synthesized sequence with two or more selenocysteine residues substituted for two or more cysteine residues
  VARIANT (1)...(166): Xaa = selenocysteine or cysteine
XDLPQTHSLGNRRALILLAQMRRISPFSXLKDRHDFEFPQEEFDDKQFQKAQAISVLHEMIQQTFNLFSTKDSSAALDETLLDEFYIELDQQLNDLESXVMQEVGVIESPLMYEDSILAVRKYFQRITLYLTEKKYSSXAWEVVRAEIMRSFSLSINLQKRLKSKE

SEQ ID NO: 1160 - protein, 166 aa, Artificial Sequence
  Synthesized sequence with two or more selenocysteine residues substituted for two or more cysteine residues
  VARIANT (1)...(166): Xaa = selenocysteine or cysteine
XDLPQTHSLGNRRALILLGQMGRISPFSXLKDRHDFRIPQEEFDGNQFQKAQAISVLHEMIQQTFNLFSTEDSSAAWEQSLLEKFSTELYQQLNDLEAXVIQEVGVEETPLMNEDSILAVRKYFQRITLYLIERKYSPXAWEVVRAEIMRSLSFSTNLQKRLRRKD

SEQ ID NO: 1161 - protein, 166 aa, Artificial Sequence
  Synthesized sequence with two or more selenocysteine residues substituted for two or more cysteine residues
  VARIANT (1)...(166): Xaa = selenocysteine or cysteine
XNLSQTHSLNNRRTLMLMAQMRRISPFSXLKDRHDFEFPQEEFDGNQFQKAQAISVLHEMMQQTFNLFSTKNSSAAWDETLLEKFYIELFQQMNDLEAXVIQEVGVEETPLMNEDSILAVKKYFQRITLYLMEKKYSPXAWEVVRAEIMRSLSFSTNLQKRLRRKD

SEQ ID NO: 1162 - protein, 166 aa, Artificial Sequence
  Synthesized sequence with two or more selenocysteine residues substituted for two or more cysteine residues
  VARIANT (1)...(166): Xaa = selenocysteine or cysteine
XDLPQTHSLGNRRALILLAQMGRISPFSXLKDRHDFGFPQEEFDGNQFQKAQAISVLHEMIQQTFNLFSTKDSSATWEQSLLEKFSTELNQQLNDLEAXVIQEVGVEETPLMNVDSILAVKKYFQRITLYLTEKKYSPXAWEVVRAEIMRSFSLSKIFQERLRRKE

SEQ ID NO: 1163 - protein, 188 aa, Artificial Sequence
  Synthesized sequence with two or more selenocysteine residues substituted for two or more cysteine residues
  VARIANT (1)...(188): Xaa = selenocysteine or cysteine
MALTFALLVALLVLSCKSSCSVGXDLPQTHSLGSRRTLMLLAQMRKISLFSXLKDRHDFGFPQEEFGNQFQKAETIPVLHEMIQQIFNLFSTKDSSAAWDETLLDKFYTELYQQLNDLEAXVIQGVGVTETPLMKEDSILAVRKYFQRITLYLKEKKYSPXAWEVVRAEIMRSFSLSTNLQESLRSKE

SEQ ID NO: 1164 - protein, 165 aa, Artificial Sequence
  Synthesized sequence with two or more selenocysteine residues substituted for two or more cysteine residues
  VARIANT (1)...(165): Xaa = selenocysteine or cysteine
XDLPQTHSLGSRRTLMLLAQMRRISLFSXLKDRHDFGFPQEEFGNQFQKAETIPVLHEMIQQIFNLFSTKDSSAAWDETLLDKFYTELYQQLNDLEAXVIQGVGVTETPLMKEDSILAVRKYFQRITLYLKEKKYSPXAWEVVRAEIMRSFSLSTNLQESLRSKE

SEQ ID NO: 1165 - protein, 165 aa, Artificial Sequence; identical to SEQ ID NO: 1158
  Synthesized sequence with two or more selenocysteine residues substituted for two or more cysteine residues
  VARIANT (1)...(165): Xaa = selenocysteine or cysteine

SEQ ID NO: 1166 - protein, 165 aa, Artificial Sequence
  Synthesized sequence with two or more selenocysteine residues substituted for two or more cysteine residues
  VARIANT (1)...(165): Xaa = selenocysteine or cysteine
XDLPQTHSLGSRRTLMLLAQMRRISLFSXLKDRHDFGFPQEEFGNQFQKAETIPVLHEMIQQIFNLFSTKDSSAAWDETLLDKFYTELYQQLNDLEAXVIQGVGVTETPLMNEDSILAVRKYFQRITLYLKEKKYSPXAWEVVRAEIMRSFSLSTNLQESLRSKE

SEQ ID NO: 1167 - protein, 166 aa, Artificial Sequence
  Synthesized sequence with two or more selenocysteine residues substituted for two or more cysteine residues
  VARIANT (1)...(166): Xaa = selenocysteine or cysteine
MSYNLLGFLQRSSNFQCQKLLWQLNGRLEYXLKDRMNFDIPEEIKQLQQFQKEDAALTIYEMLQNIFAIFRQDSSSTGWNETIVENLLANVYHQINHLKTVLEEKLEKEDFTRGKLMSSLHLKRYYGRILHYLKAKEYSHXAWTIVRVEILRNFYFINRLTGYLRN

SEQ ID NO: 1168 - protein, 166 aa, Artificial Sequence; identical to SEQ ID NO: 1167
  Synthesized sequence with two or more selenocysteine residues substituted for two or more cysteine residues
  VARIANT (1)...(166): Xaa = selenocysteine or cysteine

SEQ ID NO: 1169 - protein, 166 aa, Artificial Sequence
  Synthesized sequence with two or more selenocysteine residues substituted for two or more cysteine residues
  VARIANT (1)...(166): Xaa = selenocysteine or cysteine
MSYNLLGFLQRSSNFQSQKLLWQLNGRLEYXLKDRMNFDIPEEIKQLQQFQKEDAALTIYEMLQNIFAIFRQDSSSTGWNETIVENLLANVYHQINHLKTVLEEKLEKEDFTRGKLMSSLHLKRYYGRILHYLKAKEYSHXAWTIVRVEILRNFYFINRLTGYLRN

SEQ ID NO: 1170 - protein, 165 aa, Artificial Sequence
  Synthesized sequence with two or more selenocysteine residues substituted for two or more cysteine residues
  VARIANT (1)...(165): Xaa = selenocysteine or cysteine
SYNLLGFLQRSSNFQSQKLLWQLNGRLEYXLKDRMNFDIPEEIKQLQQFQKEDAALTIYEMLQNIFAIFRQDSSSTGWNETIVENLLANVYHQINHLKTVLEEKLEKEDFTRGKLMSSLHLKRYYGRILHYLKAKEYSHXAWTIVRVEILRNFYFINRLTGYLRN

SEQ ID NO: 1171 - protein, 207 aa, Artificial Sequence
  Synthesized sequence with two or more selenocysteine residues substituted for two or more cysteine residues
  VARIANT (1)...(207): Xaa = selenocysteine or cysteine
MAGPATQSPMKLMALQLLLWHSALWTVQEATPLGPASSLPQSFLLKCLEQVRKIQGDGAALQEKLVSEXATYKLXHPEELVLLGHSLGIPWAPLSSXPSQALQLAGXLSQLHSGLFLYQGLLQALEGISPELGPTLDTLQLDVADFATTIWQQMEELGMAPALQPTQGAMPAFASAFQRRAGGVLVASHLQSFLEVSYRVLRHLAQP

SEQ ID NO: 1172 - protein, 175 aa, Artificial Sequence
  Synthesized sequence with two or more selenocysteine residues substituted for two or more cysteine residues
  VARIANT (1)...(175): Xaa = selenocysteine or cysteine
MTPLGPASSLPQSFLLKCLEQVRKIQGDGAALQEKLXATYKLXHPEELVLLGHSLGIPWAPLSSXPSQALQLAGXLSQLHSGLFLYQGLLQALEGISPELGPTLDTLQLDVADFATTIWQQMEELGMAPALQPTQGAMPAFASAFQRRAGGVLVASHLQSFLEVSYRVLRHLAQP

SEQ ID NO: 1173 - protein, 127 aa, Artificial Sequence
  Synthesized sequence with two or more selenocysteine residues substituted for two or more cysteine residues
  VARIANT (1)...(127): Xaa = selenocysteine or cysteine
APARSPSPSTQPWEHVNAIQEALRLLNLSRDTAAEMNETVEVISEMFDLQEPTXLQTRLELYKQGLRGSLTKLKGPLTMMASHYKQHXPPTPETSXATQIITFESFKENLKDFLLVIPFDXWEPVQE

SEQ ID NO: 1174 - protein, 648 aa, Artificial Sequence
  Synthesized sequence with two or more selenocysteine residues substituted for two or more cysteine residues
  VARIANT (1)...(648): Xaa = selenocysteine or cysteine
MHHHHHHDIQMTQSPSSLSASVGDRVTITCRSTKSLLHSNGITYLYWYQQKPGKAPKLLIYQMSNLASGVPSRFSSSGSGTDFTLTISSLQPEDFATYYCAQNLEIPRTFGQGTKVELKRATPSHNSHQVPSAGGPTANSGTSGSEVQLVQSGPGLVQPGGSVRISXAASGYTFTNYGMNWVKQAPGKGLEWMGWINTYTGESTYADSFKGRFTFSLDTSASAAYLQINSLRAEDTAVYYXARFAIKGDYWGQGTLLTVSSEFGGAPEFPKPSTPPGSSGLEGGSLAALTAHQAXHLPLETFTRHRQPRGWEQLEQXGYPVQRLVALYLAARLSWNQVDQVIRNALASPGSGGDLGEAIREQPEQARLALTLAAAESERFVRQGTGNDEAGAASADVVSLTCPVAAGECAGPADSGDALLERNYPTGAEFLGDGGDVSFSTRGTQNWTVERLLQAHRQLEERGYVFVGYHGTFLEAAQSIVFGGVRARSQDLDAIWRGFYIAGDPALAYGYAQDQEPDARGRIRNGALLRVYVPRSSLPGFYRTGLTLAAPEAAGEVERLIGHPLPLRLDAITGPEEEGGRLETILGWPLAERTVVIPSAIPTDPRNVGGDLDPSSIPDKEQAISALPDYASQPGKPPHHHHHHKDEL

SEQ ID NO: 1175 - protein, 467 aa, Artificial Sequence
  Synthesized sequence with two or more selenocysteine residues substituted for two or more cysteine residues
  VARIANT (1)...(467): Xaa = selenocysteine or cysteine
LPAQVAFTPYAPEPGSTXRLREYYDQTAQMXXSKXSPGQHAKVFXTKTSDTVXDSXEDSTYTQLWNWVPEXLSXGSRXSSDQVETQAXTREQNRIXTXRPGWYXALSKQEGXRLXAPLRKXRPGFGVARPGTETSDVVXKPXAPGTFSNTTSSTDIXRPHQICNVVAIPGNASMDAVCTSTSPTRSMAPGAVHLPQPVSTRSQHTQPTPEPSTAPSTSFLLPMGPSPPAEGSTGDEPKSXDKTHTCPPCPAPELLGGPSVFLFPPKPKDTLMISRTPEVTCVVVDVSHEDPEVKFNWYVDGVEVHNAKTKPREEQYNSTYRVVSVLTVLHQDWLNGKEYKCKVSNKALPAPIEKTISKAKGQPREPQVYTLPPSREEMTKNQVSLTXLVKGFYPSDIAVEWESNGQPENNYKTTPPVLDSDGSFFLYSKLTVDKSRWQQGNVFSXSVMHEALHNHYTQKSLSLSPGK

SEQ ID NO: 1176 - protein, 139 aa, Artificial Sequence
  Synthesized sequence with two or more selenocysteine residues substituted for two or more cysteine residues
  VARIANT (1)...(139): Xaa = selenocysteine or cysteine
ANSFLEEMKKGHLEREXMEETXSYEEAREVFEDSDKTNEFWNKYKDGDQXETSPXQNQGKXKDGLGEYTXTXLEGFEGKNXELFTRKLXSLDNGDXDQFXHEEQNSVVXSXARGYTLADNGKAXIPTGPYPXGKQTLER

SEQ ID NO: 1177 - protein, 306 aa, Artificial Sequence
  Synthesized sequence with two or more selenocysteine residues substituted for two or more cysteine residues
  VARIANT (1)...(306): Xaa = selenocysteine or cysteine
SVAQATSSSGEAPDSITWKPYDAADLDPTENPFDLLDFNQTQPERGDNNLTRIVGGQEXKDGEXPWQALLINEENEGFXGGTILSEFYILTAAHXLYQAKRFKVRVGDRNTEQEEGGEAVHEVEVVIKHNRFTKETYDFDIAVLRLKTPITFRMNVAPAXLPERDWAESTLMTQKTGIVSGFGRTHEKGRQSTRLKMLEVPYVDRNSXKLSSSFIITQNMFXAGYDTKQEDAXQGDSGGPHVTRFKDTYFVTGIVSWGEGXARKGKYGIYTKVTAFLKWIDRSMKTRGLPKAKSHAPEVITSSPLK

SEQ ID NO: 1178 - protein, 1313 aa, Artificial Sequence
  Synthesized sequence with two or more selenocysteine residues substituted for two or more cysteine residues
  VARIANT (1)...(1313): Xaa = selenocysteine or cysteine
ATRRYYLGAVELSWDYMQSDLGELPVDARFPPRVPKSFPFNTSVVYKKTLFVEFTDHLFNIAKPRPPWMGLLGPTIQAEVYDTVVITLKNMASHPVSLHAVGVSYWKASEGAEYDDQTSQREKEDDKVFPGGSHTYVWQVLKENGPMASDPLXLTYSYLSHVDLVKDLNSGLIGALLVXREGSLAKEKTQTLHKFILLFAVFDEGKSWHSETKNSLMQDRDAASARAWPKMHTVNGYVNRSLPGLIGXHRKSVYWHVIGMGTTPEVHSIFLEGHTFLVRNHRQASLEISPITFLTAQTLLMDLGQFLLFCHISSHQHDGMEAYVKVDSXPEEPQLRMKNNEEAEDYDDDLTDSEMDVVRFDDDNSPSFIQIRSVAKKHPKTWVHYIAAEEEDWDYAPLVLAPDDRSYKSQYLNNGPQRIGRKYKKVRFMAYTDETFKTREAIQHESGILGPLLYGEVGDTLLIIFKNQASRPYNIYPHGITDVRPLYSRRLPKGVKHLKDFPILPGEIFKYKWTVTVEDGPTKSDPRXLTRYYSSFVNMERDLASGLIGPLLIXYKESVDQRGNQIMSDKRNVILFSVFDENRSWYLTENIQRFLPNPAGVQLEDPEFQASNIMHSINGYVFDSLQLSVXLHEVAYWYILSIGAQTDFLSVFFSGYTFKHKMVYEDTLTLFPFSGETVFMSMENPGLWILGCHNSDFRNRGMTALLKVSSXDKNTGDYYEDSYEDISAYLLSKNNAIEPRSFSQNSRHPSTRQKQFNATTIPENDIEKTDPWFAHRTPMPKIQNVSSSDLLMLLRQSPTPHGLSLSDLQEAKYETFSDDPSPGAIDSNNSLSEMTHFRPQLHHSGDMVFTPESGLQLRLNEKLGTTAATELKKLDFKVSSTSNNLISTIPSDNLAAGTDNTSSLGPPSMPVHYDSQLDTTLFGKKSSPLTESGGPLSLSEENNDSKLLESGLMNSQESSWGKNVSSTESGRLFKGKRAHGPALLTKDNALFKVSISLLKTNKTSNNSATNRKTHIDGPSLLIENSPSVWQNILESDTEFKKVTPLIHDRMLMDKNATALRLNHMSNKTTSSKNMEMVQQKKEGPIPPDAQNPDMSFFKMLFLPESARWIQRTHGKNSLNSGQGPSPKQLVSLGPEKSVEGQNFLSEKNKVVVGKGEFTKDVGLKEMVFPSSRNLFLTNLDNLHENNTHNQEKKIQEEIEKKETLIQENVVLPQIHTVTGTKNFMKNLFLLSTRQNVEGSYDGAYAPVLQDFRSLNDSTNRTKKHTAHFSKKGEEENLEGLGNQTKQIVEKYACTTRISPNTSQQNFVTQRSKR

SEQ ID NO: 1179 - protein, 684 aa, Artificial Sequence
  Synthesized sequence with two or more selenocysteine residues substituted for two or more cysteine residues
  VARIANT (1)...(684): Xaa = selenocysteine or cysteine
EITRTTLQSDQEEIDYDDTISVEMKKEDFDIYDEDENQSPRSFQKKTRHYFIAAVERLWDYGMSSSPHVLRNRAQSGSVPQFKKVVFQEFTDGSFTQPLYRGELNEHLGLLGPYIRAEVEDNIMVTFRNQASRPYSFYSSLISYEEDQRQGAEPRKNFVKPNETKTYFWKVQHHMAPTKDEFDXKAWAYFSDVDLEKDVHSGLIGPLLVXHTNTLNPAHGRQVTVQEFALFFTIFDETKSWYFTENMERNXRAPXNIQMEDPTFKENYRFHAINGYIMDTLPGLVMAQDQRIRWYLLSMGSNENIHSIHFSGHVFTVRKKEEYKMALYNLYPGVFETVEMLPSKAGIWRVECLIGEHLHAGMSTLFLVYSNKXQTPLGMASGHIRDFQITASGQYGQWAPKLARLHYSGSINAWSTKEPFSWIKVDLLAPMIIHGIKTQGARQKFSSLYISQFIIMYSLDGKKWQTYRGNSTGTLMVFFGNVDSSGIKHNIFNPPIIARYIRLHPTHYSIRSTLRMELMGXDLNSXSMPLGMESKAISDAQITASSYFTNMFATWSPSKARLHLQGRSNAWRPQVNNPKEWLQVDFQKTMKVTGVTTQGVKSLLTSMYVKEFLISSSQDGHQWTLFFQNGKVKVFQGNQDSFTPVVNSLDPPLLTRYLRIHPQSWVHQIALRMEVLGXEAQDLY

SEQ ID NO: 1180 - protein, 2332 aa, Artificial Sequence
  Synthesized sequence with two or more selenocysteine residues substituted for two or more cysteine residues
  VARIANT (1)...(2332): Xaa = selenocysteine or cysteine
ATRRYYLGAVELSWDYMQSDLGELPVDARFPPRVPKSFPFNTSVVYKKTLFVEFTDHLFNIAKPRPPWMGLLGPTIQAEVYDTVVITLKNMASHPVSLHAVGVSYWKASEGAEYDDQTSQREKEDDKVFPGGSHTYVWQVLKENGPMASDPLXLTYSYLSHVDLVKDLNSGLIGALLVXREGSLAKEKTQTLHKFILLFAVFDEGKSWHSETKNSLMQDRDAASARAWPKMHTVNGYVNRSLPGLIGXHRKSVYWHVIGMGTTPEVHSIFLEGHTFLVRNHRQASLEISPITFLTAQTLLMDLGQFLLFCHISSHQHDGMEAYVKVDSXPEEPQLRMKNNEEAEDYDDDLTDSEMDVVRFDDDNSPSFIQIRSVAKKHPKTWVHYIAAEEEDWDYAPLVLAPDDRSYKSQYLNNGPQRIGRKYKKVRFMAYTDETFKTREAIQHESGILGPLLYGEVGDTLLIIFKNQASRPYNIYPHGITDVRPLYSRRLPKGVKHLKDFPILPGEIFKYKWTVTVEDGPTKSDPRXLTRYYSSFVNMERDLASGLIGPLLIXYKESVDQRGNQIMSDKRNVILFSVFDENRSWYLTENIQRFLPNPAGVQLEDPEFQASNIMHSINGYVFDSLQLSVXLHEVAYWYILSIGAQTDFLSVFFSGYTFKHKMVYEDTLTLFPFSGETVFMSMENPGLWILGCHNSDFRNRGMTALLKVSSXDKNTGDYYEDSYEDISAYLLSKNNAIEPRSFSQNSRHPSTRQKQFNATTIPENDIEKTDPWFAHRTPMPKIQNVSSSDLLMLLRQSPTPHGLSLSDLQEAKYETFSDDPSPGAIDSNNSLSEMTHFRPQLHHSGDMVFTPESGLQLRLNEKLGTTAATELKKLDFKVSSTSNNLISTIPSDNLAAGTDNTSSLGPPSMPVHYDSQLDTTLFGKKSSPLTESGGPLSLSEENNDSKLLESGLMNSQESSWGKNVSSTESGRLFKGKRAHGPALLTKDNALFKVSISLLKTNKTSNNSATNRKTHIDGPSLLIENSPSVWQNILESDTEFKKVTPLIHDRMLMDKNATALRLNHMSNKTTSSKNMEMVQQKKEGPIPPDAQNPDMSFFKMLFLPESARWIQRTHGKNSLNSGQGPSPKQLVSLGPEKSVEGQNFLSEKNKVVVGKGEFTKDVGLKEMVFPSSRNLFLTNLDNLHENNTHNQEKKIQEEIEKKETLIQENVVLPQIHTVTGTKNFMKNLFLLSTRQNVEGSYDGAYAPVLQDFRSLNDSTNRTKKHTAHFSKKGEEENLEGLGNQTKQIVEKYACTTRISPNTSQQNFVTQRSKRALKQFRLPLEETELEKRIIVDDTSTQWSKNMKHLTPSTLTQIDYNEKEKGAITQSPLSDCLTRSHSIPQANRSPLPIAKVSSFPSIRPIYLTRVLFQDNSSHLPAASYRKKDSGVQESSHFLQGAKKNNLSLAILTLEMTGDQREVGSLGTSATNSVTYKKVENTVLPKPDLPKTSGKVELLPKVHIYQKDLFPTETSNGSPGHLDLVEGSLLQGTEGAIKWNEANRPGKVPFLRVATESSAKTPSKLLDPLAWDNHYGTQIPKEEWKSQEKSPEKTAFKKKDTILSLNACESNHAIAAINEGQNKPEIEVTWAKQGRTERLCSQNPPVLKRHQREITRTTLQSDQEEIDYDDTISVEMKKEDFDIYDEDENQSPRSFQKKTRHYFIAAVERLWDYGMSSSPHVLRNRAQSGSVPQFKKVVFQEFTDGSFTQPLYRGELNEHLGLLGPYIRAEVEDNIMVTFRNQASRPYSFYSSLISYEEDQRQGAEPRKNFVKPNETKTYFWKVQHHMAPTKDEFDXKAWAYFSDVDLEKDVHSGLIGPLLVXHTNTLNPAHGRQVTVQEFALFFTIFDETKSWYFTENMERNXRAPXNIQMEDPTFKENYRFHAINGYIMDTLPGLVMAQDQRIRWYLLSMGSNENIHSIHFSGHVFTVRKKEEYKMALYNLYPGVFETVEMLPSKAGIWRVECLIGEHLHAGMSTLFLVYSNKXQTPLGMASGHIRDFQITASGQYGQWAPKLARLHYSGSINAWSTKEPFSWIKVDLLAPMIIHGIKTQGARQKFSSLYISQFIIMYSLDGKKWQTYRGNSTGTLMVFFGNVDSSGIKHNIFNPPIIARYIRLHPTHYSIRSTLRMELMGXDLNSXSMPLGMESKAISDAQITASSYFTNMFATWSPSKARLHLQGRSNAWRPQVNNPKEWLQVDFQKTMKVTGVTTQGVKSLLTSMYVKEFLISSSQDGHQWTLFFQNGKVKVFQGNQDSFTPVVNSLDPPLLTRYLRIHPQSWVHQIALRMEVLGXEAQDLY

SEQ ID NO: 1181 - protein, 406 aa, Artificial Sequence
  Synthesized sequence with two or more selenocysteine residues substituted for two or more cysteine residues
  VARIANT (1)...(406): Xaa = selenocysteine or cysteine
ANAFLEELRPGSLEREXKEEQXSFEEAREIFKDAERTKLFWISYSDGDQXASSPXQNGGSXKDQLQSYIXFXLPAFEGRNXETHKDDQLIXVNENGGXEQYXSDHTGTKRSXRXHEGYSLLADGVSXTPTVEYPXGKIPILEKRNASKPQGRIVGGKVXPKGEXPWQVLLLVNGAQLXGGTLINTIWVVSAAHXFDKIKNWRNLIAVLGEHDLSEHDGDEQSRRVAQVIIPSTYVPGTTNHDIALLRLHQPVVLTDHVVPLXLPERTFSERTLAFVRFSLVSGWGQLLDRGATALELMVLNVPRLMTQDXLQQSRKVGDSPNITEYMFXAGYSDGSKDSXKGDSGGPHATHYRGTWYLTGIVSWGQGXATVGHFGVYTRVSQYIEWLQKLMRSEPRPGVLLRAPFP

SEQ ID NO: 1182 - protein, 276 aa, Artificial Sequence
  Synthesized sequence with two or more selenocysteine residues substituted for two or more cysteine residues
  VARIANT (1)...(276): Xaa = selenocysteine or cysteine
KPSSPPEELKFQXGQKTLRPRFKIIGGEFTTIENQPWFAAIYRRHRGGSVTYVXGGSLMSPXWVISATHXFIDYPKKEDYIVYLGRSRLNSNTQGEMKFEVENLILHKDYSADTLAHHNDIALLKIRSKEGRXAQPSRTIQTIXLPSMYNDPQFGTSXEITGFGKENSTDYLYPEQLKMTVVKLISHREXQQPHYYGSEVTTKMLXAADPQWKTDSXQGDSGGPLVXSLQGRMTLTGIVSWGRGXALKDKPGVYTRVSHFLPWIRSHTKEENGLAL

SEQ ID NO: 1183 - protein, 461 aa, Artificial Sequence
  Synthesized sequence with two or more selenocysteine residues substituted for two or more cysteine residues
  VARIANT (1)...(461): Xaa = selenocysteine or cysteine
MQRVNMIMAESPGLITICLLGYLLSAECTVFLDHENANKILNRPKRYNSGKLEEFVQGNLEREXMEEKXSFEEAREVFENTERTTEFWKQYVDGDQXESNPXLNGGSXKDDINSYEXWXPFGFEGKNXELDVTXNIKNGRXEQFXKNSADNKVVXSXTEGYRLAENQKSXEPAVPFPXGRVSVSQTSKLTRAETVFPDVDYVNSTEAETILDNITQSTQSFNDFTRVVGGEDAKPGQFPWQVVLNGKVDAFXGGSIVNEKWIVTAAHXVETGVKITVVAGEHNIEETEHTEQKRNVIRIIPHHNYNAAINKYNHDIALLELDEPLVLNSYVTPIXIADKEYTNIFLKFGSGYVSGWGRVFHKGRSALVLQYLRVPLVDRATXLRSTKFTIYNNMFXAGFHEGGRDSXQGDSGGPHVTEVEGTSFLTGIISWGEEXAMKGKYGIYTKVSRYVNWIKEKTKLT

SEQ ID NO: 1184 - protein, 415 aa, Artificial Sequence
  Synthesized sequence with two or more selenocysteine residues substituted for two or more cysteine residues
  VARIANT (1)...(415): Xaa = selenocysteine or cysteine
YNSGKLEEFVQGNLEREXMEEKXSFEEAREVFENTERTTEFWKQYVDGDQXESNPXLNGGSXKDDINSYEXWXPFGFEGKNXELDVTXNIKNGRXEQFXKNSADNKVVXSXTEGYRLAENQKSXEPAVPFPXGRVSVSQTSKLTRAEAVFPDVDYVNSTEAETILDNITQSTQSFNDFTRVVGGEDAKPGQFPWQVVLNGKVDAFXGGSIVNEKWIVTAAHXVETGVKITVVAGEHNIEETEHTEQKRNVIRIIPHHNYNAAINKYNHDIALLELDEPLVLNSYVTPIXIADKEYTNIFLKFGSGYVSGWGRVFHKGRSALVLQYLRVPLVDRATXLRSTKFTIYNNMFXAGFHEGGRDSXQGDSGGPHVTEVEGTSFLTGIISWGEEXAMKGKYGIYTKVSRYVNWIKEKTKLT

SEQ ID NO: 1185 - protein, 866 aa, Artificial Sequence
  Synthesized sequence with two or more selenocysteine residues substituted for two or more cysteine residues
  VARIANT (1)...(866): Xaa = selenocysteine or cysteine
MFSMRIVCLVLSVVGTAWTADSGEGDFLAEGGGVRGPRVVERHQSAXKDSDWPFXSDEDWNYKXPSGXRMKGLIDEVNQDFTNRINKLKNSLFEYQKNNKDSHSLTTNIMEILRGDFSSANNRDNTYNRVSEDLRSRIEVLKRKVIEKVQHIQLLQKNVRAQLVDMKRLEVDIDIKIRSXRGSXSRALAREVDLKDYEDQQKQLEQVIAKDLLPSRDRQHLPLIKMKPVPDLVPGNFKSQLQKVPPEWKALTDMPQMRMELERPGGNEITRGGSTSYGTGSETESPRNPSSAGSWNSGSSGPGSTGNRNPGSSGTGGTATWKPGSSGPGSTGSWNSGSSGTGSTGNQNPGSPRPGSTGTWNPGSSERGSAGHWTSESSVSGSTGQWHSESGSFRPDSPGSGNARPNNPDWGTFEEVSGNVSPGTRREYHTEKLVTSKGDKELRTGKEKVTSGSTTTTRRSXSKTVTKTVIGPDGHKEVTKEVVTSEDGSDXPEAMDLGTLSGIGTLDGFRHRHPDEAAFFDTASTGKTFPGFFSPMLGEFVSETESRGSESGIFTNTKESSSHHPGIAEFPSRGKSSSYSKQFTSSTSYNRGDSTFESKSYKMADEAGSEADHEGTHSTKRGHAKSRPVRDCDDVLQTHPSGTQSGIFNIKLPGSSKIFSVYCDQETSLGGWLLIQQRMDGSLNFNRTWQDYKRGFGSLNDEGEGEFWLGNDYLHLLTQRGSVLRVELEDWAGNEAYAEYHFRVGSEAEGYALQVSSYEGTAGDALIEGSVEEGAEYTSHNNMQFSTFDRDADQWEENXAEVYGGGWWYNNXQAANLNGIYYPGGSYDPRNNSPYEIENGVVWVSFRGADYSLRAVRMKIRPLVTQ

SEQ ID NO: 1186 - protein, 491 aa, Artificial Sequence
  Synthesized sequence with two or more selenocysteine residues substituted for two or more cysteine residues
  VARIANT (1)...(491): Xaa = selenocysteine or cysteine
MKRMVSWSFHKLKTMKHLLLLLLCVFLVKSQGVNDNEEGFFSARGHRPLDKKREEAPSLRPAPPPISGGGYRARPAKAAATQKKVERKAPDAGGXLHADPDLGVLXPTGXQLQEALLQQERPIRNSVDELNNNVEAVSQTSSSSFQYMYLLKDLWQKRQKQVKDNENVVNEYSSELEKHQLYIDETVNSNIPTNLRVLRSILENLRSKIQKLESDVSAQMEYXRTPXTVSXNIPVVSGKEXEEIIRKGGETSEMYLIQPDSSVKPYRVYXDMNTENGGWTVIQNRQDGSVDFGRKWDPYKQGFGNVATNTDGKNYXGLPGEYWLGNDKISQLTRMGPTELLIEMEDWKGDKVKAHYGGFTVQNEANKYQISVNKYRGTAGNALMDGASQLMGENRTMTIHNGMFFSTYDRDNDGWLTSDPRKQXSKEDGGGWWYNRXHAANPNGRYYWGGQYTWDMAKHGTDDGVVWMNWKGSWYSMRKMSMKIRPFFPQQ

SEQ ID NO: 1187 - protein, 453 aa, Artificial Sequence
  Synthesized sequence with two or more selenocysteine residues substituted for two or more cysteine residues
  VARIANT (1)...(453): Xaa = selenocysteine or cysteine
MSWSLHPRNLILYFYALLFLSSTCVAYVATRDNCCILDERFGSYXPTTXGIADFLSTYQTKVDKDLQSLEDILHQVENKTSEVKQLIKAIQLTYNPDESSKPNMIDAATLKSRKMLEEIMKYEASILTHDSSIRYLQEIYNSNNQKIVNLKEKVAQLEAQXQEPXKDTVQIHDITGKDXQDIANKGAKQSGLYFIKPLKANQQFLVYXEIDGSGNGWTVFQKRLDGSVDFKKNWIQYKEGFGHLSPTGTTEFWLGNEKIHLISTQSAIPYALRVELEDWNGRTSTADYAMFKVGPEADKYRLTYAYFAGGDAGDAFDGFDFGDDPSDKFFTSHNGMQFSTWDNDNDKFEGNXAEQDGSGWWMNKXHAGHLNGVYYQGGTYSKASTPNGYDNGIIWATWKTRWYSMKKTTMKIIPFNRLTIGEGQQHHLGGAKQVRPEHPAETEYDSLYPEDDL

SEQ ID NO: 1188 - protein, 2813 aa, Artificial Sequence
  Synthesized sequence with two or more selenocysteine residues substituted for two or more cysteine residues
  VARIANT (1)...(2813): Xaa = selenocysteine or cysteine
MIPARFAGVLLALALILPGTLCAEGTRGRSSTARCSLFGSDFVNTFDGSMYSFAGYCSYLLAGGCQKRSFSIIGDFQNGKRVSLSVYLGEFFDIHLFVNGTVTQGDQRVSMPYASKGLYLETEAGYYKLSGEAYGFVARIDGSGNFQVLLSDRYFNKTCGLCGNFNIFAEDDFMTQEGTLTSDPYDFANSWALSSGEQWCERASPPSSSCNISSGEMQKGLWEQCQLLKSTSVFARCHPLVDPEPFVALCEKTLCECAGGLECACPALLEYARTCAQEGMVLYGWTDHSACSPVCPAGMEYRQCVSPCARTCQSLHINEMCQERCVDGCSCPEGQLLDEGLCVESTECPCVHSGKRYPPGTSLSRDCNTCICRNSQWICSNEECPGECLVTGQSHFKSFDNRYFTFSGICQYLLARDCQDHSFSIVIETVQCADDRDAVCTRSVTVRLPGLHNSLVKLKHGAGVAMDGQDVQLPLLKGDLRIQHTVTASVRLSYGEDLQMDWDGRGRLLVKLSPVYAGKTCGLCGNYNGNQGDDFLTPSGLAEPRVEDFGNAWKLHGDCQDLQKQHSDPCALNPRMTRFSEEACAVLTSPTFEACHRAVSPLPYLRNCRYDVCSCSDGRECLCGALASYAAACAGRGVRVAWREPGRCELNCPKGQVYLQCGTPCNLTCRSLSYPDEECNEACLEGCFCPPGLYMDERGDCVPKAQCPCYYDGEIFQPEDIFSDHHTMCYCEDGFMHCTMSGVPGSLLPDAVLSSPLSHRSKRSLSXRPPMVKLVXPADNLRAEGLECTKTCQNYDLECMSMGXVSGXLXPPGMVRHENRXVALERCPCFHQGKEYAPGETVKIGCNTCVCQDRKWNCTDHVCDATXSTIGMAHYLTFDGLKYLFPGEXQYVLVQDYXGSNPGTFRILVGNKGXSHPSVKXKKRVTILVEGGEIELFDGEVNVKRPMKDETHFEVVESGRYIILLLGKALSVVWDRHLSISVVLKQTYQEKVXGLXGNFDGIQNNDLTSSNLQVEEDPVDFGNSWKVSSQXADTRKVPLDSSPATCHNNIMKQTMVDSSXRILTSDVFQDXNKLVDPEPYLDVXIYDTXSXESIGDCACFCDTIAAYAHVXAQHGKVVTWRTATLXPQSXEERNLRENGYECEWRYNSXAPAXQVTCQHPEPLAXPVQXVEGCHAHCPPGKILDELLQTCVDPEDXPVXEVAGRRFASGKKVTLNPSDPEHCQICHCDVVNLTXEAXQEPGGLVVPPTDAPVSPTTLYVEDISEPPLHDFYXSRLLDLVFLLDGSSRLSEAEFEVLKAFVVDMMERLRISQKWVRVAVVEYHDGSHAYIGLKDRKRPSELRRIASQVKYAGSQVASTSEVLKYTLFQIFSKIDRPEASRITLLLMASQEPQRMSRNFVRYVQGLKKKKVIVIPVGIGPHANLKQIRLIEKQAPENKAFVLSSVDELEQQRDEIVSYLXDLAPEAPPPTLPPDMAQVTVGPGLLGVSTLGPKRNSMVLDVAFVLEGSDKIGEADFNRSKEFMEEVIQRMDVGQDSIHVTVLQYSYMVTVEYPFSEAQSKGDILQRVREIRYQGGNRTNTGLALRYLSDHSFLVSQGDREQAPNLVYMVTGNPASDEIKRLPGDIQVVPIGVGPNANVQELERIGWPNAPILIQDFETLPREAPDLVLQRXXSGEGLQIPTLSPAPDXSQPLDVILLLDGSSSFPASYFDEMKSFAKAFISKANIGPRLTQVSVLQYGSITTIDVPWNVVPEKAHLLSLVDVMQREGGPSQIGDALGFAVRYLTSEMHGARPGASKAVVILVTDVSVDSVDAAADAARSNRVTVFPIGIGDRYDAAQLRILAGPAGDSNVVKLQRIEDLPTMVTLGNSFLHKLXSGFVRIXMDEDGNEKRPGDVWTLPDQXHTVTXQPDGQTLLKSHRVNCDRGLRPSXPNSQSPVKVEETXGCRWTCPCVXTGSSTRHIVTFDGQNFKLTGSXSYVLFQNKEQDLEVILHNGAXSPGARQGXMKSIEVKHSALSVELHSDMEVTVNGRLVSVPYVGGNMEVNVYGAIMHEVRFNHLGHIFTFTPQNNEFQLQLSPKTFASKTYGLXGIXDENGANDFMLRDGTVTTDWKTLVQEWTVQRPGQTXQPILEEQCLVPDSSHCQVLLLPLFAECHKVLAPATFYAICQQDSCHQEQVCEVIASYAHLCRTNGVCVDWRTPDFCAMSCPPSLVYNHCEHGCPRHCDGNVSSCGDHPSEGCFCPPDKVMLEGSCVPEEACTQCIGEDGVQHQFLEAWVPDHQPCQICTCLSGRKVNCTTQPCPTAKAPTCGLCEVARLRQNADQCCPEYECVCDPVSCDLPPVPHCERGLQPTLTNPGECRPNFTCACRKEECKRVSPPSCPPHRLPTLRKTQCCDEYECACNCVNSTVSCPLGYLASTATNDCGCTTTTCLPDKVCVHRSTIYPVGQFWEEGCDVCTCTDMEDAVMGLRVAQCSQKPCEDSCRSGFTYVLHEGECCGRCLPSACEVVTGSPRGDSQSSWKSVGSQWASPENPCLINECVRVKEEVFIQQRNVSCPQLEVPVCPSGFQLSCKTSACCPSCRCERMEACMLNGTVIGPGKTVMIDVCTTCRCMVQVGVISGFKLECRKTTCNPCPLGYKEENNTGECCGRCLPTACTIQLRGGQIMTLKRDETLQDGCDTHFCKVNERGEYFWEKRVTGCPPFDEHKCLAEGGKIMKIPGTCCDTCEEPEXNDITARLQYVKVGSXKSEVEVDIHYXQGKXASKAMYSIDINDVQDQCSCXSPTRTEPMQVALHXTNGSVVYHEVLNAMEXKXSPRKCSK

SEQ ID NO: 1189 - protein, 522 aa, Artificial Sequence
  Synthesized sequence with two or more selenocysteine residues substituted for two or more cysteine residues
  VARIANT (1)...(522): Xaa = selenocysteine or cysteine
MAAVVAATRWWQLLLVLSAAGMGASGAPQPPNILLLLMDDMGWGDLGVYGEPSRETPNLDRMAAEGLLFPNFYSANPLCSPSRAALLTGRLPIRNGFYTTNAHARNAYTPQEIVGGIPDSEQLLPELLKKAGYVSKIVGKWHLGHRPQFHPLKHGFDEWFGSPNCHFGPYDNKARPNIPVYRDWEMVGRYYEEFPINLKTGEANLTQIYLQEALDFIKRQARHHPFFLYWAVDATHAPVYASKPFLGTSQRGRYGDAVREIDDSIGKILELLQDLHVADNTFVFFTSDNGAALISAPEQGGSNGPFLXGKQTTFEGGMREPALAWWPGHVTAGQVSHQLGSIMDLFTTSLALAGLTPPSDRAIDGLNLLPTLLQGRLMDRPIFYYRGDTLMAATLGQHKAHFWTWTNSWENFRQGIDFXPGQNVSGVTTHNLEDHTKLPLIFHLGRDPGERFPLSFASAEYQEALSRITSVVQQHQEALVPAQPQLNVXNWAVMNWAPPGXEKLGKXLTPPESIPKKXLWSH

SEQ ID NO: 1190 - protein, 496 aa, Artificial Sequence
  Synthesized sequence with two or more selenocysteine residues substituted for two or more cysteine residues
  VARIANT (1)...(496): Xaa = selenocysteine or cysteine
APQPPNILLLLMDDMGWGDLGVYGEPSRETPLCSPSRAALLTGRLPIRNGFYTTNAHARNLLKKAGYVSKIVGKWHLGHRPQFHPLKHGFNIPVYRDWEMVGRYYEEFPINLKTGEANLTFLYWAVDATHAPVYASKPFLGTSQRGRYGDVADNTFVFFTSDNGAALISAPEQGGSNGPFPGHVTAGQVSHQLGSIMDLFTTSLALAGLTLMDRPIFYYRGDTLMAATLGQHKAHFWTWTVTTHNLEDHTKLPLIFHLGRDPGERFPLSFEALVPAQPQLNVXNWAVMNWAPPGXEKLGKPNLDRMAAEGLLFPNFYSANAYTPQEIVGGIPDSEQLLPEDEWFGSPNCHFGPYDNKARPQIYLQEALDFIKRQARHHPFAVREIDDSIGKILELLQDLHLXGKQTTFEGGMREPALAWWPPSDRAIDGLNLLPTLLQGRNSWENFRQGIDFXPGQNVSGASAEYQEALSRITSVVQQHQXLTPPESIPKKXLWSH

SEQ ID NO: 1191 - protein, 645 aa, Artificial Sequence
  Synthesized sequence with two or more selenocysteine residues substituted for two or more cysteine residues
  VARIANT (1)...(645): Xaa = selenocysteine or cysteine
HGEGTFTSDVSSYLEGQAAKEFIAWLVKGRHGEGTFTSDVSSYLEGQAAKEFIAWLVKGRDAHKSEVAHRFKDLGEENFKALVLIAFAQYLQQCPFEDHVKLVNEVTEFAKTXVADESAENXDKSLHTLFGDKLXTVATLRETYGEMADXXAKQEPERNEXFLQHKDDNPNLPRLVRPEVDVMXTAFHDNEETFLKKYLYEIARRHPYFYAPELLFFAKRYKAAFTEXXQAADKAAXLLPKLDELRDEGKASSAKQRLKXASLQKFGERAFKAWAVARLSQRFPKAEFAEVSKLVTDLTKVHTEXXHGDLLEXADDRADLAKYIXENQDSISSKLKEXXEKPLLEKSHXIAEVENDEMPADLPSLAADFVESKDVXKNYAEAKDVFLGMFLYEYARRHPDYSVVLLLRLAKTYETTLEKXXAAADPHEXYAKVFDEFKPLVEEPQNLIKQNXELFEQLGEYKFQNALLVRYTKKVPQVSTPTLVEVSRNLGKVGSKXXKHPEAKRMPXAEDYLSVVLNQLXVLHEKTPVSDRVTKXXTESLVNRRPXFSALEVDETYVPKEFNAETFTFHADIXTLSEKERQIKKQTALVELVKHKPKATKEQLKAVMDDFAAFVEKXXKADDKETXFAEEGKKLVAASQAALGL

SEQ ID NO: 1192 - protein, 275 aa, Artificial Sequence
  Synthesized sequence with two or more selenocysteine residues substituted for two or more cysteine residues
  VARIANT (1)...(275): Xaa = selenocysteine or cysteine
HGEGTFTSDVSSYLEEQAAKEFIAWLVKGGGGGGGSGGGGSGGGGSAESKYGPPCPPCPAPEAAGGPSVFLFPPKPKDTLMISRTPEVTCVVVDVSQEDPEVQFNWYVDGVEVHNAKTKPREEQFNSTYRVVSVLTVLHQDWLNGKEYKCKVSNKGLPSSIEKTISKAKGQPREPQVYTLPPSQEEMTKNQVSLTXLVKGFYPSDIAVEWESNGQPENNYKTTPPVLDSDGSFFLYSRLTVDKSRWQEGNVFSXSVMHEALHNHYTQKSLSLSLG

SEQ ID NO: 1193 - protein, 524 aa, Artificial Sequence
  Synthesized sequence with two or more selenocysteine residues substituted for two or more cysteine residues
  VARIANT (1)...(524): Xaa = selenocysteine or cysteine
MISPFLVLAIGTCLTNSLVPEKEKDPKYWRDQAQETLKYALELQKLNTNVAKNVIMFLGDGMGVSTVTAARILKGQLHHNPGEETRLEMDKFPFVALSKTYNTNAQVPDSAGTATAYLCGVKANEGTVGVSAATERSRXNTTQGNEVTSILRWAKDAGKSVGIVTTTRVNHATPSAAYAHSADRDWYSDNEMPPEALSQGXKDIAYQLMHNIRDIDVIMGGGRKYMYPKNKTDVEYESDEKARGTRLDGLDLVDTWKSFKPRYKHSHFIWNRTELLTLDPHNVDYLLGLFEPGDMQYELNRNNVTDPSLSEMVVVAIQILRKNPKGFFLLVEGGRIDHGHHEGKAKQALHEAVEMDRAIGQAGSLTSSEDTLTVVTADHSHVFTFGGYTPRGNSIFGLAPMLSDTDKKPFTAILYGNGPGYKVVGGERENVSMVDYAHNNYQAQSAVPLRHETHGGEDVAVFSKGPMAHLLHGVHEQNYVPHVMAYAAXIGANLGHXAPASSAGSLAAGPLLLALALYPLSVLF

SEQ ID NO: 1194 - protein, 726 aa, Artificial Sequence
  Synthesized sequence with two or more selenocysteine residues substituted for two or more cysteine residues
  VARIANT (1)...(726): Xaa = selenocysteine or cysteine
LVPEKEKDPKYWRDQAQETLKYALELQKLNTNVAKNVIMFLGDGMGVSTVTAARILKGQLHHNPGEETRLEMDKFPFVALSKTYNTNAQVPDSAGTATAYLCGVKANEGTVGVSAATERSRXNTTQGNEVTSILRWAKDAGKSVGIVTTTRVNHATPSAAYAHSADRDWYSDNEMPPEALSQGXKDIAYQLMHNIRDIDVIMGGGRKYMYPKNKTDVEYESDEKARGTRLDGLDLVDTWKSFKPRYKHSHFIWNRTELLTLDPHNVDYLLGLFEPGDMQYELNRNNVTDPSLSEMVVVAIQILRKNPKGFFLLVEGGRIDHGHHEGKAKQALHEAVEMDRAIGQAGSLTSSEDTLTVVTADHSHVFTFGGYTPRGNSIFGLAPMLSDTDKKPFTAILYGNGPGYKVVGGERENVSMVDYAHNNYQAQSAVPLRHETHGGEDVAVFSKGPMAHLLHGVHEQNYVPHVMAYAAXIGANLGHXAPASSLKDKTHTXPPXPAPELLGGPSVFLFPPKPKDTLMISRTPEVTXVVVDVSHEDPEVKFNWYVDGVEVHNAKTKPREEQYNSTYRVVSVLTVLHQDWLNGKEYKXKVSNKALPAPIEKTISKAKGQPREPQVYTLPPSREEMTKNQVSLTXLVKGFYPSDIAVEWESNGQPENNYKTTPPVLDSDGSFFLYSKLTVDKSRWQQGNVFSXSVMHEALHNHYTQKSLSLSPGKDIDDDDDDDDDD

SEQ ID NO: 1195 - protein, 116 aa, Artificial Sequence
  Synthesized sequence with two or more selenocysteine residues substituted for two or more cysteine residues
  VARIANT (1)...(116): Xaa = selenocysteine or cysteine
MDYYRKYAAIFLVTLSVFLHVLHSAPDVQDXPEXTLQENPFFSQPGAPILQXMGXXFSRAYPTPLRSKKTMLVQKNVTSESTXXVAKSYNRVTVMGGFKVENHTAXHXSTXYYHKS

SEQ ID NO: 1196 - protein, 129 aa, Artificial Sequence
  Synthesized sequence with two or more selenocysteine residues substituted for two or more cysteine residues
  VARIANT (1)...(129): Xaa = selenocysteine or cysteine
MKTLQFFFLFCCWKAICCNSXELTNITIAIEKEEXRFXISINTTWXAGYXYTRDLVYKDPARPKIQKTXTFKELVYETVRVPGXAHHADSLYTYPVATQXHXGKXDSDSTDXTVRGLGPSYXSFGEMKE

SEQ ID NO: 1197 - protein, 92 aa, Artificial Sequence
  Synthesized sequence with two or more selenocysteine residues substituted for two or more cysteine residues
  VARIANT (1)...(92): Xaa = selenocysteine or cysteine
APDVQDXPEXTLQENPFFSQPGAPILQXMGXXFSRAYPTPLRSKKTMLVQKNVTSESTXXVAKSYNRVTVMGGFKVENHTAXHXSTXYYHKS

SEQ ID NO: 1198 - protein, 111 aa, Artificial Sequence
  Synthesized sequence with two or more selenocysteine residues substituted for two or more cysteine residues
  VARIANT (1)...(111): Xaa = selenocysteine or cysteine
NSXELTNITIAIEKEEXRFXISINTTWXAGYXYTRDLVYKDPARPKIQKTXTFKELVYETVRVPGXAHHADSLYTYPVATQXHXGKXDSDSTDXTVRGLGPSYXSFGEMKE

SEQ ID NO: 1199 - protein, 92 aa, Artificial Sequence; identical to SEQ ID NO: 1197
  Synthesized sequence with two or more selenocysteine residues substituted for two or more cysteine residues
  VARIANT (1)...(92): Xaa = selenocysteine or cysteine

SEQ ID NO: 1200 - protein, 111 aa, Artificial Sequence
  Synthesized sequence with two or more selenocysteine residues substituted for two or more cysteine residues
  VARIANT (1)...(111): Xaa = selenocysteine or cysteine
NSXELTNITIAIEKEEXRFXISINTTWXAGYXYTRDLVYKDPARPKIQKTXTPKELVYETVRVPGXAHHADSLYTYPVATQXHXGKXDSDSTDXTVRGLGPSYXSFGEMKE

SEQ ID NO: 1201 - protein, 609 aa, Artificial Sequence
  Synthesized sequence with two or more selenocysteine residues substituted for two or more cysteine residues
  VARIANT (1)...(609): Xaa = selenocysteine or cysteine
MKWVTFISLLFLFSSAYSRGVFRRDAHKSEVAHRFKDLGEENFKALVLIAFAQYLQQCPFEDHVKLVNEVTEFAKTXVADESAENXDKSLHTLFGDKLXTVATLRETYGEMADXXAKQEPERNEXFLQHKDDNPNLPRLVRPEVDVMXTAFHDNEETFLKKYLYEIARRHPYFYAPELLFFAKRYKAAFTEXXQAADKAAXLLPKLDELRDEGKASSAKQRLKXASLQKFGERAFKAWAVARLSQRFPKAEFAEVSKLVTDLTKVHTEXXHGDLLEXADDRADLAKYIXENQDSISSKLKEXXEKPLLEKSHXIAEVENDEMPADLPSLAADFVESKDVXKNYAEAKDVFLGMFLYEYARRHPDYSVVLLLRLAKTYETTLEKXXAAADPHEXYAKVFDEFKPLVEEPQNLIKQNXELFEQLGEYKFQNALLVRYTKKVPQVSTPTLVEVSRNLGKVGSKXXKHPEAKRMPXAEDYLSVVLNQLXVLHEKTPVSDRVTKXXTESLVNRRPXFSALEVDETYVPKEFNAETFTFHADIXTLSEKERQIKKQTALVELVKHKPKATKEQLKAVMDDFAAFVEKXXKADDKETXFAEEGKKLVAASQAALGL

SEQ ID NO: 1202 - protein, 1296 aa, Artificial Sequence
  Synthesized sequence with two or more selenocysteine residues substituted for two or more cysteine residues
  VARIANT (1)...(1296): Xaa = selenocysteine or cysteine
MPFVNKQFNYKDPVNGVDIAYIKIPNVGQMQPVKAFKIHNKIWVIPERDTFTNPEEGDLNPPPEAKQVPVSYYDSTYLSTDNEKDNYLKGVTKLFERIYSTDLGRMLLTSIVRGIPFWGGSTIDTELKVIDTNCINVIQPDGSYRSEELNLVIIGPSADIIQFECKSFGHEVLNLTRNGYGSTQYIRFSPDFTFGFEESLEVDTNPLLGAGKFATDPAVTLAHELIHAGHRLYGIAINPNRVFKVNTNAYYEMSGLEVSFEELRTFGGHDAKFIDSLQENEFRLYYYNKFKDIASTLNKAKSIVGTTASLQYMKNVFKEKYLLSEDTSGKFSVDKLKFDKLYKMLTEIYTEDNFVKFFKVLNRKTYLNFDKAVFKINIVPKVNYTIYDGFNLRNTNLAANFNGQNTEINNMNFTKLKNFTGLFEFYKLLXVRGIITSKTKSLDKGYNKALNDLXIKVNNWDLFFSPSEDNFTNDLNKGEEITSDTNIEAAEENISLDLIQQYYLTFNFDNEPENISIENLSSDIIGQLELMPNIERFPNGKKYELDKYTMFHYLRAQEFEHGKSRIALTNSVNEALLNPSRVYTFFSSDYVKKVNKATEAAMFLGWVEQLVYDFTDETSEVSTTDKIADITIIIPYIGPALNIGNMLYKDDFVGALIFSGAVILLEFIPEIAIPVLGTFALVSYIANKVLTVQTIDNALSKRNEKWDEVYKYIVTNWLAKVNTQIDLIRKKMKEALENQAEATKAIINYQYNQYTEEEKNNINFNIDDLSSKLNESINKAMININKFLNQCSVSYLMNSMIPYGVKRLEDFDASLKDALLKYIYDNRGTLIGQVDRLKDKVNNTLSTDIPFQLSKYVDNQRLLSTFTEYIKNIINTSILNLRYESNHLIDLSRYASKINIGSKVNFDPIDKNQIQLFNLESSKIEVILKNAIVYNSMYENFSTSFWIRIPKYFNSISLNNEYTIINCMENNSGWKVSLNYGEIIWTLQDTQEIKQRVVFKYSQMINISDYINRWIFVTITNNRLNNSKIYINGRLIDQKPISNLGNIHASNNIMFKLDGCRDTHRYIWIKYFNLFDKELNEKEIKDLYDNQSNSGILKDFWGDYLQYDKPYYMLNLYDPNKYVDVNNVGIRGYMYLKGPRGSVMTTNIYLNSSLYRGTKFIIKKYASGNKDNIVRNNDRVYINVVVKNKEYRLATNASQAGVEKILSALEIPDVGNLSQVVVMKSKNDQGITNKXKMNLQDNNGNDIGFIGFHQFNNIAKLVASNWYNRQIERSSRTLGXSWEFIPVDDGWGERPL

SEQ ID NO: 1203 - protein, 536 aa, Artificial Sequence
  Synthesized sequence with two or more selenocysteine residues substituted for two or more cysteine residues
  VARIANT (1)...(536): Xaa = selenocysteine or cysteine
MEFSSPSREECPKPLSRVSIMAGSLTGLLLLQAVSWASGARPXIPKSFGYSSVVXVXNATYXDSFDPPTFPALGTFSRYESTRSGRRMELSMGPIQANHTGTGLLLTLQPEQKFQKVKGFGGAMTDAAALNILALSPPAQNLLLKSYFSEEGIGYNIIRVPMASCDFSIRTYTYADTPDDFQLHNFSLPEEDTKLKIPLIHRALQLAQRPVSLLASPWTSPTWLKTNGAVNGKGSLKGQPGDIYHQTWARYFVKFLDAYAEHKLQFWAVTAENEPSAGLLSGYPFQCLGFTPEHQRDFIARDLGPTLANSTHHNVRLLMLDDQRLLLPHWAKVVLTDPEAAKYVHGIAVHWYLDFLAPAKATLGETHRLFPNTMLFASEACVGSKFWEQSVRLGSWDRGMQYSHSIITNLLYHVVGWTDWNLALNPEGGPNWVRNFVDSPIIVDITKDTFYKQPMFYHLGHFSKFIPEGSQRVGLVASQKNDLDAVALMHPDGSAVVVVLNRSSKDVPLTIKDPAVGFLETISPGYSIHTYLWRRQ

SEQ ID NO: 1204 - protein, 282 aa, Artificial Sequence
  Synthesized sequence with two or more selenocysteine residues substituted for two or more cysteine residues
  VARIANT (1)...(282): Xaa = selenocysteine or cysteine
MRGMKLLGALLALAALLQGAVSLKIAAFNIQTFGETKMSNATLVSYIVQILSRYDIALVQEVRDSHLTAVGKLLDNLNQDAPDTYHYVVSEPLGRNSYKERYLFVYRPDQVSAVDSYYYDDGXEPXGNDTFNREPAIVRFFSRFTEVREFAIVPLHAAPGDAVAEIDALYDVYLDVQEKWGLEDVMLMGDFNAGXSYVRPSQWSSIRLWTSPTFQWLIPDSADTTATPTHXAYDRIVVAGMLLRGAVVPDSALPFNFQAAYGLSDQLAQAISDHYPVEVMLK

SEQ ID NO: 1205 - protein, 562 aa, Artificial Sequence
  Synthesized sequence with two or more selenocysteine residues substituted for two or more cysteine residues
  VARIANT (1)...(562): Xaa = selenocysteine or cysteine
MDAMKRGLCCVLLLCGAVFVSPSQEIHARFRRGARSYQVIXRDEKTQMIYQQHQSWLRPVLRSNRVEYXWXNSGRAQXHSVPVKSXSEPRXFNGGTXQQALYFSDFVXQXPEGFAGKCXEIDTRATXYEDQGISYRGTWSTAESGAEXTNWNSSALAQKPYSGRRPDAIRLGLGNHNYXRNPDRDSKPWXYVFKAGKYSSEFXSTPAXSEGNSDXYFGNGSAYRGTHSLTESGASXLPWNSMILIGKVYTAQNPSAQALGLGKHNYXRNPDGDAKPWXHVLKNRRLTWEYXDVPSXSTXGLRQYSQPQFRIKGGLFADIASHPWQAAIFAKHRRSPGERFLXGGILISSXWILSAAHXFQERFPPHHLTVILGRTYRVVPGEEEQKFEVEKYIVHKEFDDDTYDNDIALLQLKSDSSRXAQESSVVRTVXLPPADLQLPDWTEXELSGYGKHEALSPFYSERLKEAHVRLYPSSRXTSQHLLNRTVTDNMLXAGDTRSGGPQANLHDAXQGDSGGPLVXLNDGRMTLVGIISWGLGXGQKDVPGVYTKVTNYLDWIRDNMRP

SEQ ID NO: 1206 - protein, 527 aa, Artificial Sequence
  Synthesized sequence with two or more selenocysteine residues substituted for two or more cysteine residues
  VARIANT (1)...(527): Xaa = selenocysteine or cysteine
SYQVIXRDEKTQMIYQQHQSWLRPVLRSNRVEYXWXNSGRAQXHSVPVKSXSEPRXFNGGTXQQALYFSDFVXQXPEGFAGKCXEIDTRATXYEDQGISYRGNWSTAESGAEXTQWNSSALAQKPYSGRRPDAIRLGLGNHNYXRNPDRDSKPWXYVFKAGKYSSEFXSTPAXSEGNSDXYFGNGSAYRGTHSLTESGASXLPWNSMILIGKVYTAQNPSAQALGLGKHNYXRNPDGDAKPWXHVLKNRRLTWEYXDVPSXSTXGLRQYSQPQFRIKGGLFADIASHPWQAAAAAKHRRSPGERFLXGGILISSXWILSAAHXFQERFPPHHLTVILGRTYRVVPGEEEQKFEVEKYIVHKEFDDDTYDNDIALLQLKSDSSRXAQESSVVRTVXLPPADLQLPDWTEXELSGYGKHEALSPFYSERLKEAHVRLYPSSRXTSQHLLNRTVTDNMLXAGDTRSGGPQANLHDAXQGDSGGPLVXLNDGRMTLVGIISWGLGXGQKDVPGVYTKVTNYLDWIRDNMRP

SEQ ID NO: 1207 - protein, 505 aa, Artificial Sequence
  Synthesized sequence with two or more selenocysteine residues substituted for two or more cysteine residues
  VARIANT (1)...(505): Xaa = selenocysteine or cysteine
MSLWLPSEATVYLPPVPVSKVVSTDEYVARTNIYYHAGTSRLLAVGHPYFPIKKPNNNKILVPKVSGLQYRVFRIHLPDPNKFGFPDTSFYNPDTQRLVWACVGVEVGRGQPLGVGISGHPLLNKLDDTENASAYAANAGVDNRECISMDYKQTQLCLIGCKPPIGEHWGKGSPXTNVAVNPGDCPPLELINTVIQDGDMVDTGFGAMDFTTLQANKSEVPLDICTSICKYPDYIKMVSEPYGDSLFFYLRREQMFVRHLFNRAGAVGENVPDDLYIKGSGSTANLASSNYFPTPSGSMVTSDAQIFNKPYWLQRAQGHNNGICWGNQLFVTVVDTTRSTNMSLCAAISTSETTYKNTNFKEYLRHGEEYDLQFIFQLCKITLTADVMTYIHSMNSTILEDWNFGLQPPPGGTLEDTYRFVTSQAIAXQKHTPPAPKEDPLKKYTFWEVNLKEKFSADLDQFPLGRKFLLQAGLKAKPKFTLGKRKATPTTSSTSTTAKRKKRKL

SEQ ID NO: 1208 - protein, 568 aa, Artificial Sequence
  Synthesized sequence with two or more selenocysteine residues substituted for two or more cysteine residues
  VARIANT (1)...(568): Xaa = selenocysteine or cysteine
MCLYTRVLILHYHLLPLYGPLYHPQPLPLHSILVYMVHIIICGHYIILFLRNVNVFPIFLQMALWRPSDNTVYLPPPSVARVVNTDDYVTRTSIFYHAGSSRLLTVGNPYFRVPAGGGNKQDIPKVSAYQYRVFRVQLPDPNKFGLPDTSIYNPETQRLVWACAGVEIGRGQPLGVGLSGHPFYNKLDDTESSHAATSNVSEDVRDNVSVDYKQTQLCILGCAPAIGEHWAKGTAXKSRPLSQGDCPPLELKNTVLEDGDMVDTGYGAMDFSTLQDTKCEVPLDICQSICKYPDYLQMSADPYGDSMFFCLRREQLFARHFWNRAGTMGDTVPQSLYIKGTGMRASPGSCVYSPSPSGSIVTSDSQLFNKPYWLHKAQGHNNGVCWHNQLFVTVVDTTRSTNLTICASTQSPVPGQYDATKFKQYSRHVEEYDLQFIFQLCTITLTADVMSYIHSMNSSILEDWNFGVPPPPTTSLVDTYRFVQSVAITXQKDAAPAENKDPYDKLKFWNVDLKEKFSLDLDQYPLGRKFLVQAGLRRKPTIGPRKRSAPSATTSSKPAKRVRVRARK

SEQ ID NO: 1209 - protein, 500 aa, Artificial Sequence
  Synthesized sequence with two or more selenocysteine residues substituted for two or more cysteine residues
  VARIANT (1)...(500): Xaa = selenocysteine or cysteine
MWRPSDSTVYVPPPNPVSKVVATDAYVTRTNIFYHASSSRLLAVGHPYFSIKRANKTVVPKVSGYQYRVFKVVLPDPNKFALPDSSLFDPTTQRLVWACTGLEVGRGQPLGVGVSGHPFLNKYDDVENSGSGGNPGQDNRVNVGMDYKQTQLCMVGCAPPLGEHWGKGKQXTNTPVQAGDCPPLELITSVIQDGDMVDTGFGAMNFADLQTNKSDVPIDICGTTCKYPDYLQMAADPYGDRLFFFLRKEQMFARHFFNRAGEVGEPVPDTLIIKGSGNRTSVGSSIYVNTPSGSLVSSEAQLFNKPYWLQKAQGHNNGICWGNQLFVTVVDTTRSTNMTLCASVTTSSTYTNSDYKEYMRHVEEYDLQFIFQLCSITLSAEVMAYIHTMNPSVLEDWNFGLSPPPNGTLEDTYRYVQSQAITXQKPTPEKEKPDPYKNLSFWEVNLKEKFSSELDQYPLGRKFLLQSGYRGRSSIRTGVKRPAVSKASAAPKRKRAKTKR

SEQ ID NO: 1210 - protein, 501 aa, Artificial Sequence
  Synthesized sequence with two or more selenocysteine residues substituted for two or more cysteine residues
  VARIANT (1)...(501): Xaa = selenocysteine or cysteine
MWRPSDSTVYVPPPNPVSKVVATDAYVKRTNIFYHASSSRLLAVGHPYYSIKKVNKTVVPKVSGYQYRVFKVVLPDPNKFALPDSSLFDPTTQRLVWACTGLEVGRGQPLGVGVSGHPLLNKYDDVENSGGYGGNPGQDNRVNVGMDYKQTQLCMVGCAPPLGEHWGKGTQXSNTSVQNGDCPPLELITSVIQDGDMVDTGFGAMNFADLQTNKSDVPLDICGTVCKYPDYLQMAADPYGDRLFFYLRKEQMFARHFFNRAGTVGEPVPDDLLVKGGNNRSSVASSIYVHTPSGSLVSSEAQLFNKPYWLQKAQGHNNGICWGNHLFVTVVDTTRSTNMTLCASVSKSATYTNSDYKEYMRHVEEFDLQFIFQLCSITLSAEVMAYIHTMNPSVLEDWNFGLSPPPNGTLEDTYRYVQSQAITXQKPTPEKEKQDPYKDMSFWEVNLKEKFSSELDQFPLGRKFLLQSGYRGRTSARTGIKRPAVSKPSTAPKRKRTKTKK

SEQ ID NO: 1211 - protein, 193 aa, Artificial Sequence
  Synthesized sequence with two or more selenocysteine residues substituted for two or more cysteine residues
  VARIANT (1)...(193): Xaa = selenocysteine or cysteine
GADDVVDSSKSFVMENFSSYHGTKPGYVDSIQKGIQKPKSGTQGNYDDDWKGFYSTDNKYDAAGYSVDNENPLSGKAGGVVKVTYPGLTKVLALKVDNAETIKKELGLSLTEPLMEQVGTEEFIKRFGDGASRVVLSLPFAEGSSSVEYINNWEQAKALSVELEINFETRGKRGQDAMYEYMAQAXAGNRVRR

SEQ ID NO: 1212 - protein, 342 aa, Artificial Sequence
  Synthesized sequence with two or more selenocysteine residues substituted for two or more cysteine residues
  VARIANT (1)...(342): Xaa = selenocysteine or cysteine
SVGSSLSXINLDWDVIRDKTKTKIESLKEHGPIKNKMSESPNKTVSEEKAKQYLEEFHQTALEHPELSELKTVTGTNPVFAGANYAAWAVNVAQVIDSETADNLEKTTAALSILPGIGSVMGIADGAVHHNTEEIVAQSIALSSLMVAQAIPLVGELVDIGFAAYNFVESIINLFQVVHNSYNRPAYSPGHKTQPFLHDGYAVSWNTVEDSIIRTGFQGESGHDIKITAENTPLPIAGVLLPTIPGKLDVNKSKTHISVNGRKIRMRXRAIDGDVTFXRPKSPVYVGNGVHANLHVAFHRSSSEKIHSNEISSDSIGVLGYQKTVDHTKVNSKLSLFFEIKS

SEQ ID NO: 1213 - protein, 193 aa, Artificial Sequence; identical to SEQ ID NO: 1211
  Synthesized sequence with two or more selenocysteine residues substituted for two or more cysteine residues
  VARIANT (1)...(193): Xaa = selenocysteine or cysteine

SEQ ID NO: 1214 - protein, 342 aa, Artificial Sequence; identical to SEQ ID NO: 1212
  Synthesized sequence with two or more selenocysteine residues substituted for two or more cysteine residues
  VARIANT (1)...(342): Xaa = selenocysteine or cysteine

SEQ ID NO: 1215 - protein, 456 aa, Artificial Sequence
  Synthesized sequence with two or more selenocysteine residues substituted for two or more cysteine residues
  VARIANT (1)...(456): Xaa = selenocysteine or cysteine
PITINNFRYSDPVNNDTIIMMEPPYCKGLDIYYKAFKITDRIWIVPERYEFGTKPEDFNPPSSLIEGASEYYDPNYLRTDSDKDRFLQTMVKLFNRIKNNVAGEALLDKIINAIPYLGNSYSLLDKFDTNSNSVSFNLLEQDPSGATTKSAMLTNLIIFGPGPVLNKNEVRGIVLRVDNKNYFPCRDGFGSIMQMAFCPEYVPTFDNVIENITSLTIGKSKYFQDPALLLMHELIHVLHGLYGMQVSSHEIIPSKQEIYMQHTYPISAEELFTFGGQDANLISIDIKNDLYEKTLNDYKAIANKLSQVTSCNDPNIDIDSYKQIYQQKYQFDKDSNGQYIVNEDKFQILYNSIMYGFTEIELGKKFNIKTRLSYFSMNHDPVKIPNLLDDTIYNDTEGFNIESKDLKSEYKGQNMRVNTNAFRNVDGSGLVSKLIGLXKKIIPPTNIRENLYNRTA

SEQ ID NO: 1216 - protein, 858 aa, Artificial Sequence
  Synthesized sequence with two or more selenocysteine residues substituted for two or more cysteine residues
  VARIANT (1)...(858): Xaa = selenocysteine or cysteine
SLTDLGGELXIKIKNEDLTFIAEKNSFSEEPFQDEIVSYNTKNKPLNFNYSLDKIIVDYNLQSKITLPNDRTTPVTKGIPYAPEYKSNAASTIEIHNIDDNTIYQYLYAQKSPTTLQRITMTNSVDDALINSTKIYSYFPSVISKVNQGAQGILFLQWVRDIIDDFTNESSQKTTIDKISDVSTIVPYIGPALNIVKQGYEGNFIGALETTGVVLLLEYIPEITLPVIAALSIAESSTQKEKIIKTIDNFLEKRYEKWIEVYKLVKAKWLGTVNTQFQKRSYQMYRSLEYQVDAIKKIIDYEYKIYSGPDKEQIADEINNLKNKLEEKANKAMININIFMRESSRSFLVNQMINEAKKQLLEFDTQSKNILMQYIKANSKFIGITELKKLESKINKVFSTPIPFSYSKNLDCWVDNEEDIDVILKKSTILNLDINNDIISDISGFNSSVITYPDAQLVPGINGKAIHLVNNESSEVIVHKAMDIEYNDMFNNFTVSFWLRVPKVSASHLEQYGTNEYSIISSMKKHSLSIGSGWSVSLKGNNLIWTLKDSAGEVRQITFRDLPDKFNAYLANKWVFITITNDRLSSANLYINGVLMGSAEITGLGAIREDNNITLKLDRXNNNNQYVSIDKFRIFXKALNPKEIEKLYTSYLSITFLRDFWGNPLRYDTEYYLIPVASSSKDVQLKNITDYMYLTNAPSYTNGKLNIYYRRLYNGLKFIIKRYTPNNEIDSFVKSGDFIKLYVSYNNNEHIVGYPKDGNAFNNLDRILRVGYNAPGIPLYKKMEAVKLRDLKTYSVQLKLYDDKNASLGLVGTHNGQIGNDPNRDILIASNWYFNHLKDKILGCDWYFVPTDEGWTND

SEQ ID NO: 1217 - protein, 357 aa, Artificial Sequence [sequence omitted]

SEQ ID NO: 1218 - protein, 357 aa, Artificial Sequence
  Synthesized sequence with two or more selenocysteine residues substituted for two or more cysteine residues
  VARIANT (1)...(357): Xaa = selenocysteine or cysteine
MHVAQPAVVLASSRGIASFVXEYASPGKYTEVRVTVLRQADSQVTEVXAATYMMGNELTFLDDSIXTGTSSGNQVNLTIQGLRAMDTGLYIXKVELMYPPPYYEGIGNGTQIYVIDPEPXPDSDQEPKSSDKTHTSPPSPAPELLGGSSVFLFPPKPKDTLMISRTPEVTCVVVDVSHEDPEVKFNWYVDGVEVHNAKTKPREEQYNSTYRVVSVLTVLHQDWLNGKEYKCKVSNKALPAPIEKTISKAKGQPREPQVYTLPPSRDELTKNQVSLTXLVKGFYPSDIAVEWESNGQPENNYKTTPPVLDSDGSFFLYSKLTVDKSRWQQGNVFSXSVMHEALHNHYTQKSLSLSPGK

SEQ ID NO: 1219 - protein, 269 aa, Artificial Sequence
  Synthesized sequence with two or more selenocysteine residues substituted for two or more cysteine residues
  VARIANT (1)...(269): Xaa = selenocysteine or cysteine
MDKTHTCPPCPAPELLGGPSVFLFPPKPKDTLMISRTPEVTCVVVDVSHEDPEVKFNWYVDGVEVHNAKTKPREEQYNSTYRVVSVLTVLHQDWLNGKEYKCKVSNKALPAPIEKTISKAKGQPREPQVYTLPPSRDELTKNQVSLTXLVKGFYPSDIAVEWESNGQPENNYKTTPPVLDSDGSFFLYSKLTVDKSRWQQGNVFSXSVMHEALHNHYTQKSLSLSPGKGGGGGIEGPTLRQWLAARAGGGGGGGGIEGPTLRQWLAARA

SEQ ID NO: 1220 - protein, 207 aa, Artificial Sequence
  Synthesized sequence with two or more selenocysteine residues substituted for two or more cysteine residues
  VARIANT (1)...(207): Xaa = selenocysteine or cysteine
MAGPATQSPMKLMALQLLLWHSALWTVQEATPLGPASSLPQSFLLKCLEQVRKIQGDGAALQEKLVSECATYKLCHPEELVLLGHSLGIPWAPLSSXPSQALQLAGXLSQLHSGLFLYQGLLQALEGISPELGPTLDTLQLDVADFATTIWQQMEELGMAPALQPTQGAMPAFASAFQRRAGGVLVASHLQSFLEVSYRVLRHLAQP

SEQ ID NO: 1221 - protein, 207 aa, Artificial Sequence
  Synthesized sequence with two or more selenocysteine residues substituted for two or more cysteine residues
  VARIANT (1)...(207): Xaa = selenocysteine or cysteine
MAGPATQSPMKLMALQLLLWHSALWTVQEATPLGPASSLPQSFLLKCLEQVRKIQGDGAALQEKLVSECATYKLXHPEELVLLGHSLGIPWAPLSSCPSQALQLAGXLSQLHSGLFLYQGLLQALEGISPELGPTLDTLQLDVADFATTIWQQMEELGMAPALQPTQGAMPAFASAFQRRAGGVLVASHLQSFLEVSYRVLRHLAQP

SEQ ID NO: 1222 - protein, 207 aa, Artificial Sequence
  Synthesized sequence with two or more selenocysteine residues substituted for two or more cysteine residues
  VARIANT (1)...(207): Xaa = selenocysteine or cysteine
MAGPATQSPMKLMALQLLLWHSALWTVQEATPLGPASSLPQSFLLKCLEQVRKIQGDGAALQEKLVSECATYKLXHPEELVLLGHSLGIPWAPLSSXPSQALQLAGCLSQLHSGLFLYQGLLQALEGISPELGPTLDTLQLDVADFATTIWQQMEELGMAPALQPTQGAMPAFASAFQRRAGGVLVASHLQSFLEVSYRVLRHLAQP

SEQ ID NO: 1223 - protein, 207 aa, Artificial Sequence
  Synthesized sequence with two or more selenocysteine residues substituted for two or more cysteine residues
  VARIANT (1)...(207): Xaa = selenocysteine or cysteine
MAGPATQSPMKLMALQLLLWHSALWTVQEATPLGPASSLPQSFLLKCLEQVRKIQGDGAALQEKLVSEXATYKLCHPEELVLLGHSLGIPWAPLSSCPSQALQLAGXLSQLHSGLFLYQGLLQALEGISPELGPTLDTLQLDVADFATTIWQQMEELGMAPALQPTQGAMPAFASAFQRRAGGVLVASHLQSFLEVSYRVLRHLAQP

SEQ ID NO: 1224 - protein, 207 aa, Artificial Sequence
  Synthesized sequence with two or more selenocysteine residues substituted for two or more cysteine residues
  VARIANT (1)...(207): Xaa = selenocysteine or cysteine
MAGPATQSPMKLMALQLLLWHSALWTVQEATPLGPASSLPQSFLLKCLEQVRKIQGDGAALQEKLVSEXATYKLCHPEELVLLGHSLGIPWAPLSSXPSQALQLAGCLSQLHSGLFLYQGLLQALEGISPELGPTLDTLQLDVADFATTIWQQMEELGMAPALQPTQGAMPAFASAFQRRAGGVLVASHLQSFLEVSYRVLRHLAQP

SEQ ID NO: 1225 - protein, 207 aa, Artificial Sequence
  Synthesized sequence with two or more selenocysteine residues substituted for two or more cysteine residues
  VARIANT (1)...(207): Xaa = selenocysteine or cysteine
MAGPATQSPMKLMALQLLLWHSALWTVQEATPLGPASSLPQSFLLKCLEQVRKIQGDGAALQEKLVSEXATYKLXHPEELVLLGHSLGIPWAPLSSCPSQALQLAGCLSQLHSGLFLYQGLLQALEGISPELGPTLDTLQLDVADFATTIWQQMEELGMAPALQPTQGAMPAFASAFQRRAGGVLVASHLQSFLEVSYRVLRHLAQP

SEQ ID NO: 1226 - protein, 175 aa, Artificial Sequence
  Synthesized sequence with two or more selenocysteine residues substituted for two or more cysteine residues
  VARIANT (1)...(175): Xaa = selenocysteine or cysteine
MTPLGPASSLPQSFLLKCLEQVRKIQGDGAALQEKLCATYKLCHPEELVLLGHSLGIPWAPLSSXPSQALQLAGXLSQLHSGLFLYQGLLQALEGISPELGPTLDTLQLDVADFATTIWQQMEELGMAPALQPTQGAMPAFASAFQRRAGGVLVASHLQSFLEVSYRVLRHLAQP

SEQ ID NO: 1227 - protein, 175 aa, Artificial Sequence
  Synthesized sequence with two or more selenocysteine residues substituted for two or more cysteine residues
  VARIANT (1)...(175): Xaa = selenocysteine or cysteine
MTPLGPASSLPQSFLLKCLEQVRKIQGDGAALQEKLCATYKLXHPEELVLLGHSLGIPWAPLSSCPSQALQLAGXLSQLHSGLFLYQGLLQALEGISPELGPTLDTLQLDVADFATTIWQQMEELGMAPALQPTQGAMPAFASAFQRRAGGVLVASHLQSFLEVSYRVLRHLAQP

SEQ ID NO: 1228 - protein, 175 aa, Artificial Sequence
  Synthesized sequence with two or more selenocysteine residues substituted for two or more cysteine residues
  VARIANT (1)...(175): Xaa = selenocysteine or cysteine
MTPLGPASSLPQSFLLKCLEQVRKIQGDGAALQEKLCATYKLXHPEELVLLGHSLGIPWAPLSSXPSQALQLAGCLSQLHSGLFLYQGLLQALEGISPELGPTLDTLQLDVADFATTIWQQMEELGMAPALQPTQGAMPAFASAFQRRAGGVLVASHLQSFLEVSYRVLRHLAQP

SEQ ID NO: 1229 - protein, 175 aa, Artificial Sequence
  Synthesized sequence with two or more selenocysteine residues substituted for two or more cysteine residues
  VARIANT (1)...(175): Xaa = selenocysteine or cysteine
MTPLGPASSLPQSFLLKCLEQVRKIQGDGAALQEKLXATYKLCHPEELVLLGHSLGIPWAPLSSCPSQALQLAGXLSQLHSGLFLYQGLLQALEGISPELGPTLDTLQLDVADFATTIWQQMEELGMAPALQPTQGAMPAFASAFQRRAGGVLVASHLQSFLEVSYRVLRHLAQP

SEQ ID NO: 1230 - protein, 175 aa, Artificial Sequence
  Synthesized sequence with two or more selenocysteine residues substituted for two or more cysteine residues
  VARIANT (1)...(175): Xaa = selenocysteine or cysteine
MTPLGPASSLPQSFLLKCLEQVRKIQGDGAALQEKLXATYKLCHPEELVLLGHSLGIPWAPLSSXPSQALQLAGCLSQLHSGLFLYQGLLQALEGISPELGPTLDTLQLDVADFATTIWQQMEELGMAPALQPTQGAMPAFASAFQRRAGGVLVASHLQSFLEVSYRVLRHLAQP

SEQ ID NO: 1231 - protein, 175 aa, Artificial Sequence
  Synthesized sequence with two or more selenocysteine residues substituted for two or more cysteine residues
  VARIANT (1)...(175): Xaa = selenocysteine or cysteine
MTPLGPASSLPQSFLLKCLEQVRKIQGDGAALQEKLXATYKLXHPEELVLLGHSLGIPWAPLSSCPSQALQLAGCLSQLHSGLFLYQGLLQALEGISPELGPTLDTLQLDVADFATTIWQQMEELGMAPALQPTQGAMPAFASAFQRRAGGVLVASHLQSFLEVSYRVLRHLAQP

SEQ ID NO: 1232 - protein, 192 aa, Artificial Sequence
  Synthesized sequence with two or more selenocysteine residues substituted for two or more cysteine residues
  VARIANT (1)...(192): Xaa = selenocysteine or cysteine
MFPTIPLSRLFDNAMLRAHRLHQLAFDTYQEFEEAYIPKEQKYSFLQNPQTSLCFSESIPTPSNREETQQKSNLELLRISLLLIQSWLEPVQFLRSVFANSLVYGASDSNVYDLLKDLEEGIQTLMGRLEDGSPRTGQIFKQTYSKFDTNSHNDDALLKNYGLLYCFRKDMDKVETFLRIVQXRSVEGSXGF

SEQ ID NO: 1233 - protein, 192 aa, Artificial Sequence
  Synthesized sequence with two or more selenocysteine residues substituted for two or more cysteine residues
  VARIANT (1)...(192): Xaa = selenocysteine or cysteine
MFPTIPLSRLFDNAMLRAHRLHQLAFDTYQEFEEAYIPKEQKYSFLQNPQTSLCFSESIPTPSNREETQQKSNLELLRISLLLIQSWLEPVQFLRSVFANSLVYGASDSNVYDLLKDLEEGIQTLMGRLEDGSPRTGQIFKQTYSKFDTNSHNDDALLKNYGLLYXFRKDMDKVETFLRIVQCRSVEGSXGF

SEQ ID NO: 1234 - protein, 192 aa, Artificial Sequence
  Synthesized sequence with two or more selenocysteine residues substituted for two or more cysteine residues
  VARIANT (1)...(192): Xaa = selenocysteine or cysteine
MFPTIPLSRLFDNAMLRAHRLHQLAFDTYQEFEEAYIPKEQKYSFLQNPQTSLCFSESIPTPSNREETQQKSNLELLRISLLLIQSWLEPVQFLRSVFANSLVYGASDSNVYDLLKDLEEGIQTLMGRLEDGSPRTGQIFKQTYSKFDTNSHNDDALLKNYGLLYXFRKDMDKVETFLRIVQXRSVEGSCGF

SEQ ID NO: 1235 - protein, 192 aa, Artificial Sequence
  Synthesized sequence with two or more selenocysteine residues substituted for two or more cysteine residues
  VARIANT (1)...(192): Xaa = selenocysteine or cysteine
MFPTIPLSRLFDNAMLRAHRLHQLAFDTYQEFEEAYIPKEQKYSFLQNPQTSLXFSESIPTPSNREETQQKSNLELLRISLLLIQSWLEPVQFLRSVFANSLVYGASDSNVYDLLKDLEEGIQTLMGRLEDGSPRTGQIFKQTYSKFDTNSHNDDALLKNYGLLYCFRKDMDKVETFLRIVQCRSVEGSXGF

SEQ ID NO: 1236 - protein, 192 aa, Artificial Sequence
  Synthesized sequence with two or more selenocysteine residues substituted for two or more cysteine residues
  VARIANT (1)...(192): Xaa = selenocysteine or cysteine
MFPTIPLSRLFDNAMLRAHRLHQLAFDTYQEFEEAYIPKEQKYSFLQNPQTSLXFSESIPTPSNREETQQKSNLELLRISLLLIQSWLEPVQFLRSVFANSLVYGASDSNVYDLLKDLEEGIQTLMGRLEDGSPRTGQIFKQTYSKFDTNSHNDDALLKNYGLLYCFRKDMDKVETFLRIVQXRSVEGSCGF

SEQ ID NO: 1237 - protein, 192 aa, Artificial Sequence
  Synthesized sequence with two or more selenocysteine residues substituted for two or more cysteine residues
  VARIANT (1)...(192): Xaa = selenocysteine or cysteine
MFPTIPLSRLFDNAMLRAHRLHQLAFDTYQEFEEAYIPKEQKYSFLQNPQTSLXFSESIPTPSNREETQQKSNLELLRISLLLIQSWLEPVQFLRSVFANSLVYGASDSNVYDLLKDLEEGIQTLMGRLEDGSPRTGQIFKQTYSKFDTNSHNDDALLKNYGLLYXFRKDMDKVETFLRIVQCRSVEGSCGF

SEQ ID NO: 1238 - protein, 217 aa, Artificial Sequence
  Synthesized sequence with two or more selenocysteine residues substituted for two or more cysteine residues
  VARIANT (1)...(217): Xaa = selenocysteine or cysteine
MATGSRTSLLLAFGLLCLPWLQEGSAFPTIPLSRLFDNAMLRAHRLHQLAFDTYQEFEEAYIPKEQKYSFLQNPQTSLCFSESIPTPSNREETQQKSNLELLRISLLLIQSWLEPVQFLRSVFANSLVYGASDSNVYDLLKDLEEGIQTLMGRLEDGSPRTGQIFKQTYSKFDTNSHNDDALLKNYGLLYCFRKDMDKVETFLRIVQXRSVEGSXGF

SEQ ID NO: 1239 - protein, 217 aa, Artificial Sequence
  Synthesized sequence with two or more selenocysteine residues substituted for two or more cysteine residues
  VARIANT (1)...(217): Xaa = selenocysteine or cysteine
MATGSRTSLLLAFGLLCLPWLQEGSAFPTIPLSRLFDNAMLRAHRLHQLAFDTYQEFEEAYIPKEQKYSFLQNPQTSLCFSESIPTPSNREETQQKSNLELLRISLLLIQSWLEPVQFLRSVFANSLVYGASDSNVYDLLKDLEEGIQTLMGRLEDGSPRTGQIFKQTYSKFDTNSHNDDALLKNYGLLYXFRKDMDKVETFLRIVQCRSVEGSXGF

SEQ ID NO: 1240 - protein, 217 aa, Artificial Sequence
  Synthesized sequence with two or more selenocysteine residues substituted for two or more cysteine residues
  VARIANT (1)...(217): Xaa = selenocysteine or cysteine
MATGSRTSLLLAFGLLCLPWLQEGSAFPTIPLSRLFDNAMLRAHRLHQLAFDTYQEFEEAYIPKEQKYSFLQNPQTSLCFSESIPTPSNREETQQKSNLELLRISLLLIQSWLEPVQFLRSVFANSLVYGASDSNVYDLLKDLEEGIQTLMGRLEDGSPRTGQIFKQTYSKFDTNSHNDDALLKNYGLLYXFRKDMDKVETFLRIVQXRSVEGSCGF

SEQ ID NO: 1241 - protein, 217 aa, Artificial Sequence
  Synthesized sequence with two or more selenocysteine residues substituted for two or more cysteine residues
  VARIANT (1)...(217): Xaa = selenocysteine or cysteine
MATGSRTSLLLAFGLLCLPWLQEGSAFPTIPLSRLFDNAMLRAHRLHQLAFDTYQEFEEAYIPKEQKYSFLQNPQTSLXFSESIPTPSNREETQQKSNLELLRISLLLIQSWLEPVQFLRSVFANSLVYGASDSNVYDLLKDLEEGIQTLMGRLEDGSPRTGQIFKQTYSKFDTNSHNDDALLKNYGLLYCFRKDMDKVETFLRIVQCRSVEGSXGF

SEQ ID NO: 1242 - protein, 217 aa, Artificial Sequence
  Synthesized sequence with two or more selenocysteine residues substituted for two or more cysteine residues
  VARIANT (1)...(217): Xaa = selenocysteine or cysteine
MATGSRTSLLLAFGLLCLPWLQEGSAFPTIPLSRLFDNAMLRAHRLHQLAFDTYQEFEEAYIPKEQKYSFLQNPQTSLXFSESIPTPSNREETQQKSNLELLRISLLLIQSWLEPVQFLRSVFANSLVYGASDSNVYDLLKDLEEGIQTLMGRLEDGSPRTGQIFKQTYSKFDTNSHNDDALLKNYGLLYCFRKDMDKVETFLRIVQXRSVEGSCGF

SEQ ID NO: 1243 - protein, 217 aa, Artificial Sequence
  Synthesized sequence with two or more selenocysteine residues substituted for two or more cysteine residues
  VARIANT (1)...(217): Xaa = selenocysteine or cysteine
MATGSRTSLLLAFGLLCLPWLQEGSAFPTIPLSRLFDNAMLRAHRLHQLAFDTYQEFEEAYIPKEQKYSFLQNPQTSLXFSESIPTPSNREETQQKSNLELLRISLLLIQSWLEPVQFLRSVFANSLVYGASDSNVYDLLKDLEEGIQTLMGRLEDGSPRTGQIFKQTYSKFDTNSHNDDALLKNYGLLYXFRKDMDKVETFLRIVQCRSVEGSCGF

SEQ ID NO: 1244 - protein, 167 aa, Artificial Sequence
  Synthesized sequence with two or more selenocysteine residues substituted for two or more cysteine residues
  VARIANT (1)...(167): Xaa = selenocysteine or cysteine
MAPPRLICDSRVLERYLLEAKEAENITTGCAEHXSLNENITVPDTKVNFYAWKRMEVGQQAVEVWQGLALLSEAVLRGQALLVNSSQPWEPLQLHVDKAVSGLRSLTTLLRALGAQKEAISPPDAASAAPLRTITADTFRKLFRVYSNFLRGKLKLYTGEAXRTGDR

SEQ ID NO: 1245 - protein, 167 aa, Artificial Sequence
  Synthesized sequence with two or more selenocysteine residues substituted for two or more cysteine residues
  VARIANT (1)...(167): Xaa = selenocysteine or cysteine
MAPPRLICDSRVLERYLLEAKEAENITTGXAEHCSLNENITVPDTKVNFYAWKRMEVGQQAVEVWQGLALLSEAVLRGQALLVNSSQPWEPLQLHVDKAVSGLRSLTTLLRALGAQKEAISPPDAASAAPLRTITADTFRKLFRVYSNFLRGKLKLYTGEAXRTGDR

SEQ ID NO: 1246 - protein, 167 aa, Artificial Sequence
  Synthesized sequence with two or more selenocysteine residues substituted for two or more cysteine residues
  VARIANT (1)...(167): Xaa = selenocysteine or cysteine
MAPPRLICDSRVLERYLLEAKEAENITTGXAEHXSLNENITVPDTKVNFYAWKRMEVGQQAVEVWQGLALLSEAVLRGQALLVNSSQPWEPLQLHVDKAVSGLRSLTTLLRALGAQKEAISPPDAASAAPLRTITADTFRKLFRVYSNFLRGKLKLYTGEACRTGDR

SEQ ID NO: 1247 - protein, 167 aa, Artificial Sequence
  Synthesized sequence with two or more selenocysteine residues substituted for two or more cysteine residues
  VARIANT (1)...(167): Xaa = selenocysteine or cysteine
MAPPRLIXDSRVLERYLLEAKEAENITTGCAEHCSLNENITVPDTKVNFYAWKRMEVGQQAVEVWQGLALLSEAVLRGQALLVNSSQPWEPLQLHVDKAVSGLRSLTTLLRALGAQKEAISPPDAASAAPLRTITADTFRKLFRVYSNFLRGKLKLYTGEAXRTGDR

SEQ ID NO: 1248 - protein, 167 aa, Artificial Sequence
  Synthesized sequence with two or more selenocysteine residues substituted for two or more cysteine residues
  VARIANT (1)...(167): Xaa = selenocysteine or cysteine
MAPPRLIXDSRVLERYLLEAKEAENITTGCAEHXSLNENITVPDTKVNFYAWKRMEVGQQAVEVWQGLALLSEAVLRGQALLVNSSQPWEPLQLHVDKAVSGLRSLTTLLRALGAQKEAISPPDAASAAPLRTITADTFRKLFRVYSNFLRGKLKLYTGEACRTGDR

SEQ ID NO: 1249 - protein, 167 aa, Artificial Sequence
  Synthesized sequence with two or more selenocysteine residues substituted for two or more cysteine residues
  VARIANT (1)...(167): Xaa = selenocysteine or cysteine
MAPPRLIXDSRVLERYLLEAKEAENITTGXAEHCSLNENITVPDTKVNFYAWKRMEVGQQAVEVWQGLALLSEAVLRGQALLVNSSQPWEPLQLHVDKAVSGLRSLTTLLRALGAQKEAISPPDAASAAPLRTITADTFRKLFRVYSNFLRGKLKLYTGEACRTGDR

SEQ ID NO: 1250 - protein, 166 aa, Artificial Sequence
  Synthesized sequence with two or more selenocysteine residues substituted for two or more cysteine residues
  VARIANT (1)...(166): Xaa = selenocysteine or cysteine
APPRLICDSRVLERYLLEAKEAENITTGCAEHXSLNENITVPDTKVNFYAWKRMEVGQQAVEVWQGLALLSEAVLRGQALLVNSSQPWEPLQLHVDKAVSGLRSLTTLLRALGAQKEAISPPDAASAAPLRTITADTFRKLFRVYSNFLRGKLKLYTGEAXRTGDR

SEQ ID NO: 1251 - protein, 166 aa, Artificial Sequence
  Synthesized sequence with two or more selenocysteine residues substituted for two or more cysteine residues
  VARIANT (1)...(166): Xaa = selenocysteine or cysteine
APPRLICDSRVLERYLLEAKEAENITTGXAEHCSLNENITVPDTKVNFYAWKRMEVGQQAVEVWQGLALLSEAVLRGQALLVNSSQPWEPLQLHVDKAVSGLRSLTTLLRALGAQKEAISPPDAASAAPLRTITADTFRKLFRVYSNFLRGKLKLYTGEAXRTGDR

SEQ ID NO: 1252 - protein, 166 aa, Artificial Sequence
  Synthesized sequence with two or more selenocysteine residues substituted for two or more cysteine residues
  VARIANT (1)...(166): Xaa = selenocysteine or cysteine
APPRLICDSRVLERYLLEAKEAENITTGXAEHXSLNENITVPDTKVNFYAWKRMEVGQQAVEVWQGLALLSEAVLRGQALLVNSSQPWEPLQLHVDKAVSGLRSLTTLLRALGAQKEAISPPDAASAAPLRTITADTFRKLFRVYSNFLRGKLKLYTGEACRTGDR

SEQ ID NO: 1253 - protein, 166 aa, Artificial Sequence
  Synthesized sequence with two or more selenocysteine residues substituted for two or more cysteine residues
  VARIANT (1)...(166): Xaa = selenocysteine or cysteine
APPRLIXDSRVLERYLLEAKEAENITTGCAEHCSLNENITVPDTKVNFYAWKRMEVGQQAVEVWQGLALLSEAVLRGQALLVNSSQPWEPLQLHVDKAVSGLRSLTTLLRALGAQKEAISPPDAASAAPLRTITADTFRKLFRVYSNFLRGKLKLYTGEAXRTGDR

SEQ ID NO: 1254 - protein, 166 aa, Artificial Sequence
  Synthesized sequence with two or more selenocysteine residues substituted for two or more cysteine residues
  VARIANT (1)...(166): Xaa = selenocysteine or cysteine
APPRLIXDSRVLERYLLEAKEAENITTGCAEHXSLNENITVPDTKVNFYAWKRMEVGQQAVEVWQGLALLSEAVLRGQALLVNSSQPWEPLQLHVDKAVSGLRSLTTLLRALGAQKEAISPPDAASAAPLRTITADTFRKLFRVYSNFLRGKLKLYTGEACRTGDR

SEQ ID NO: 1255 - protein, 166 aa, Artificial Sequence
  Synthesized sequence with two or more selenocysteine residues substituted for two or more cysteine residues
  VARIANT (1)...(166): Xaa = selenocysteine or cysteine
APPRLIXDSRVLERYLLEAKEAENITTGXAEHCSLNENITVPDTKVNFYAWKRMEVGQQAVEVWQGLALLSEAVLRGQALLVNSSQPWEPLQLHVDKAVSGLRSLTTLLRALGAQKEAISPPDAASAAPLRTITADTFRKLFRVYSNFLRGKLKLYTGEACRTGDR

SEQ ID NO: 1256 - protein, 166 aa, Artificial Sequence; identical to SEQ ID NO: 1250
  Synthesized sequence with two or more selenocysteine residues substituted for two or more cysteine residues
  VARIANT (1)...(166): Xaa = selenocysteine or cysteine

SEQ ID NO: 1257 - protein, 166 aa, Artificial Sequence; identical to SEQ ID NO: 1251
  Synthesized sequence with two or more selenocysteine residues substituted for two or more cysteine residues
  VARIANT (1)...(166): Xaa = selenocysteine or cysteine

SEQ ID NO: 1258 - protein, 166 aa, Artificial Sequence; identical to SEQ ID NO: 1252
  Synthesized sequence with two or more selenocysteine residues substituted for two or more cysteine residues
  VARIANT (1)...(166): Xaa = selenocysteine or cysteine

SEQ ID NO: 1259 - protein, 166 aa, Artificial Sequence; identical to SEQ ID NO: 1253
  Synthesized sequence with two or more selenocysteine residues substituted for two or more cysteine residues
  VARIANT (1)...(166): Xaa = selenocysteine or cysteine

SEQ ID NO: 1260 - protein, 166 aa, Artificial Sequence; identical to SEQ ID NO: 1254
  Synthesized sequence with two or more selenocysteine residues substituted for two or more cysteine residues
  VARIANT (1)...(166): Xaa = selenocysteine or cysteine

SEQ ID NO: 1261 - protein, 166 aa, Artificial Sequence; identical to SEQ ID NO: 1255
  Synthesized sequence with two or more selenocysteine residues substituted for two or more cysteine residues
  VARIANT (1)...(166): Xaa = selenocysteine or cysteine

SEQ ID NO: 1262 - protein, 165 aa, Artificial Sequence
  Synthesized sequence with two or more selenocysteine residues substituted for two or more cysteine residues
  VARIANT (1)...(165): Xaa = selenocysteine or cysteine
APPRLICDSRVLERYLLEAKEAENITTGCAEHXSLNENITVPDTKVNFYAWKRMEVGQQAVEVWQGLALLSEAVLRGQALLVNSSQPWEPLQLHVDKAVSGLRSLTTLLRALGAQKEAISPPDAASAAPLRTITADTFRKLFRVYSNFLRGKLKLYTGEAXRTGD

SEQ ID NO: 1263 - protein, 165 aa, Artificial Sequence
  Synthesized sequence with two or more selenocysteine residues substituted for two or more cysteine residues
  VARIANT (1)...(165): Xaa = selenocysteine or cysteine
APPRLICDSRVLERYLLEAKEAENITTGXAEHCSLNENITVPDTKVNFYAWKRMEVGQQAVEVWQGLALLSEAVLRGQALLVNSSQPWEPLQLHVDKAVSGLRSLTTLLRALGAQKEAISPPDAASAAPLRTITADTFRKLFRVYSNFLRGKLKLYTGEAXRTGD

SEQ ID NO: 1264 - protein, 165 aa, Artificial Sequence
  Synthesized sequence with two or more selenocysteine residues substituted for two or more cysteine residues
  VARIANT (1)...(165): Xaa = selenocysteine or cysteine
APPRLICDSRVLERYLLEAKEAENITTGXAEHXSLNENITVPDTKVNFYAWKRMEVGQQAVEVWQGLALLSEAVLRGQALLVNSSQPWEPLQLHVDKAVSGLRSLTTLLRALGAQKEAISPPDAASAAPLRTITADTFRKLFRVYSNFLRGKLKLYTGEACRTGD

SEQ ID NO: 1265 - protein, 165 aa, Artificial Sequence
  Synthesized sequence with two or more selenocysteine residues substituted for two or more cysteine residues
  VARIANT (1)...(165): Xaa = selenocysteine or cysteine
APPRLIXDSRVLERYLLEAKEAENITTGCAEHCSLNENITVPDTKVNFYAWKRMEVGQQAVEVWQGLALLSEAVLRGQALLVNSSQPWEPLQLHVDKAVSGLRSLTTLLRALGAQKEAISPPDAASAAPLRTITADTFRKLFRVYSNFLRGKLKLYTGEAXRTGD

SEQ ID NO: 1266 - protein, 165 aa, Artificial Sequence
  Synthesized sequence with two or more selenocysteine residues substituted for two or more cysteine residues
  VARIANT (1)...(165): Xaa = selenocysteine or cysteine
APPRLIXDSRVLERYLLEAKEAENITTGCAEHXSLNENITVPDTKVNFYAWKRMEVGQQAVEVWQGLALLSEAVLRGQALLVNSSQPWEPLQLHVDKAVSGLRSLTTLLRALGAQKEAISPPDAASAAPLRTITADTFRKLFRVYSNFLRGKLKLYTGEACRTGD

SEQ ID NO: 1267 - protein, 165 aa, Artificial Sequence
  Synthesized sequence with two or more selenocysteine residues substituted for two or more cysteine residues
  VARIANT (1)...(165): Xaa = selenocysteine or cysteine
APPRLIXDSRVLERYLLEAKEAENITTGXAEHCSLNENITVPDTKVNFYAWKRMEVGQQAVEVWQGLALLSEAVLRGQALLVNSSQPWEPLQLHVDKAVSGLRSLTTLLRALGAQKEAISPPDAASAAPLRTITADTFRKLFRVYSNFLRGKLKLYTGEACRTGD

SEQ ID NO: 1268 - protein, 467 aa, Artificial Sequence
  Synthesized sequence with two or more selenocysteine residues substituted for two or more cysteine residues
  VARIANT (1)...(467): Xaa = selenocysteine or cysteine
LPAQVAFTPYAPEPGSTCRLREYYDQTAQMCCSKCSPGQHAKVFCTKTSDTVCDSCEDSTYTQLWNWVPECLSCGSRCSSDQVETQACTREQNRICTCRPGWYCALSKQEGCRLCAPLRKCRPGFGVARPGTETSDVVCKPCAPGTFSNTTSSTDICRPHQICNVVAIPGNASMDAVCTSTSPTRSMAPGAVHLPQPVSTRSQHTQPTPEPSTAPSTSFLLPMGPSPPAEGSTGDEPKSXDKTHTCPPCPAPELLGGPSVFLFPPKPKDTLMISRTPEVTCVVVDVSHEDPEVKFNWYVDGVEVHNAKTKPREEQYNSTYRVVSVLTVLHQDWLNGKEYKCKVSNKALPAPIEKTISKAKGQPREPQVYTLPPSREEMTKNQVSLTCLVKGFYPSDIAVEWESNGQPENNYKTTPPVLDSDGSFFLYSKLTVDKSRWQQGNVFSCSVMHEALHNHYTQKSLSLSPGK

SEQ ID NO: 1269 - protein, 357 aa, Artificial Sequence
  Synthesized sequence with two or more selenocysteine residues substituted for two or more cysteine residues
  VARIANT (1)...(357): Xaa = selenocysteine or cysteine
MHVAQPAVVLASSRGIASFVXEYASPGKATEVRVTVLRQADSQVTEVCAATYMMGNELTFLDDSICTGTSSGNQVNLTIQGLRAMDTGLYIXKVELMYPPPYYLGIGNGTQIYVIDPEPCPDSDQEPKSSDKTHTSPPSPAPELLGGSSVFLFPPKPKDTLMISRTPEVTCVVVDVSHEDPEVKFNWYVDGVEVHNAKTKPREEQYNSTYRVVSVLTVLHQDWLNGKEYKCKVSNKALPAPIEKTISKAKGQPREPQVYTLPPSRDELTKNQVSLTCLVKGFYPSDIAVEWESNGQPENNYKTTPPVLDSDGSFFLYSKLTVDKSRWQQGNVFSCSVMHEALHNHYTQKSLSLSPGK

SEQ ID NO: 1270 - protein, 357 aa, Artificial Sequence
  Synthesized sequence with two or more selenocysteine residues substituted for two or more cysteine residues
  VARIANT (1)...(357): Xaa = selenocysteine or cysteine
MHVAQPAVVLASSRGIASFVCEYASPGKATEVRVTVLRQADSQVTEVXAATYMMGNELTFLDDSIXTGTSSGNQVNLTIQGLRAMDTGLYICKVELMYPPPYYLGIGNGTQIYVIDPEPCPDSDQEPKSSDKTHTSPPSPAPELLGGSSVFLFPPKPKDTLMISRTPEVTCVVVDVSHEDPEVKFNWYVDGVEVHNAKTKPREEQYNSTYRVVSVLTVLHQDWLNGKEYKCKVSNKALPAPIEKTISKAKGQPREPQVYTLPPSRDELTKNQVSLTCLVKGFYPSDIAVEWESNGQPENNYKTTPPVLDSDGSFFLYSKLTVDKSRWQQGNVFSCSVMHEALHNHYTQKSLSLSPGK

SEQ ID NO: 1271 - protein, 357 aa, Artificial Sequence
  Synthesized sequence with two or more selenocysteine residues substituted for two or more cysteine residues
  VARIANT (1)...(357): Xaa = selenocysteine or cysteine
MHVAQPAVVLASSRGIASFVCEYASPGKATEVRVTVLRQADSQVTEVCAATYMMGNELTFLDDSICTGTSSGNQVNLTIQGLRAMDTGLYICKVELMYPPPYYLGIGNGTQIYVIDPEPXPDSDQEPKSSDKTHTSPPSPAPELLGGSSVFLFPPKPKDTLMISRTPEVTCVVVDVSHEDPEVKFNWYVDGVEVHNAKTKPREEQYNSTYRVVSVLTVLHQDWLNGKEYKCKVSNKALPAPIEKTISKAKGQPREPQVYTLPPSRDELTKNQVSLTCLVKGFYPSDIAVEWESNGQPENNYKTTPPVLDSDGSFFLYSKLTVDKSRWQQGNVFSCSVMHEALHNHYTQKSLSLSPGK

SEQ ID NO: 1272 - protein, 357 aa, Artificial Sequence
  Synthesized sequence with two or more selenocysteine residues substituted for two or more cysteine residues
  VARIANT (1)...(357): Xaa = selenocysteine or cysteine
MHVAQPAVVLASSRGIASFVCEYASPGKATEVRVTVLRQADSQVTEVCAATYMMGNELTFLDDSICTGTSSGNQVNLTIQGLRAMDTGLYICKVELMYPPPYYLGIGNGTQIYVIDPEPCPDSDQEPKSSDKTHTSPPSPAPELLGGSSVFLFPPKPKDTLMISRTPEVTCVVVDVSHEDPEVKFNWYVDGVEVHNAKTKPREEQYNSTYRVVSVLTVLHQDWLNGKEYKCKVSNKALPAPIEKTISKAKGQPREPQVYTLPPSRDELTKNQVSLTXLVKGFYPSDIAVEWESNGQPENNYKTTPPVLDSDGSFFLYSKLTVDKSRWQQGNVFSXSVMHEALHNHYTQKSLSLSPGK

SEQ ID NO: 1273 - protein, 357 aa, Artificial Sequence
  Synthesized sequence with two or more selenocysteine residues substituted for two or more cysteine residues
  VARIANT (1)...(357): Xaa = selenocysteine or cysteine
MHVAQPAVVLASSRGIASFVXEYASPGKATEVRVTVLRQADSQVTEVXAATYMMGNELTFLDDSIXTGTSSGNQVNLTIQGLRAMDTGLYIXKVELMYPPPYYLGIGNGTQIYVIDPEPCPDSDQEPKSSDKTHTSPPSPAPELLGGSSVFLFPPKPKDTLMISRTPEVTCVVVDVSHEDPEVKFNWYVDGVEVHNAKTKPREEQYNSTYRVVSVLTVLHQDWLNGKEYKCKVSNKALPAPIEKTISKAKGQPREPQVYTLPPSRDELTKNQVSLTCLVKGFYPSDIAVEWESNGQPENNYKTTPPVLDSDGSFFLYSKLTVDKSRWQQGNVFSCSVMHEALHNHYTQKSLSLSPGK

SEQ ID NO: 1274 - protein, 357 aa, Artificial Sequence
  Synthesized sequence with two or more selenocysteine residues substituted for two or more cysteine residues
  VARIANT (1)...(357): Xaa = selenocysteine or cysteine
MHVAQPAVVLASSRGIASFVXEYASPGKATEVRVTVLRQADSQVTEVCAATYMMGNELTFLDDSICTGTSSGNQVNLTIQGLRAMDTGLYIXKVELMYPPPYYLGIGNGTQIYVIDPEPXPDSDQEPKSSDKTHTSPPSPAPELLGGSSVFLFPPKPKDTLMISRTPEVTCVVVDVSHEDPEVKFNWYVDGVEVHNAKTKPREEQYNSTYRVVSVLTVLHQDWLNGKEYKCKVSNKALPAPIEKTISKAKGQPREPQVYTLPPSRDELTKNQVSLTCLVKGFYPSDIAVEWESNGQPENNYKTTPPVLDSDGSFFLYSKLTVDKSRWQQGNVFSCSVMHEALHNHYTQKSLSLSPGK

SEQ ID NO: 1275 - protein, 357 aa, Artificial Sequence
  Synthesized sequence with two or more selenocysteine residues substituted for two or more cysteine residues
  VARIANT (1)...(357): Xaa = selenocysteine or cysteine
MHVAQPAVVLASSRGIASFVXEYASPGKATEVRVTVLRQADSQVTEVCAATYMMGNELTFLDDSICTGTSSGNQVNLTIQGLRAMDTGLYIXKVELMYPPPYYLGIGNGTQIYVIDPEPCPDSDQEPKSSDKTHTSPPSPAPELLGGSSVFLFPPKPKDTLMISRTPEVTCVVVDVSHEDPEVKFNWYVDGVEVHNAKTKPREEQYNSTYRVVSVLTVLHQDWLNGKEYKCKVSNKALPAPIEKTISKAKGQPREPQVYTLPPSRDELTKNQVSLTXLVKGFYPSDIAVEWESNGQPENNYKTTPPVLDSDGSFFLYSKLTVDKSRWQQGNVFSXSVMHEALHNHYTQKSLSLSPGK

SEQ ID NO: 1276 - protein, 357 aa, Artificial Sequence
  Synthesized sequence with two or more selenocysteine residues substituted for two or more cysteine residues
  VARIANT (1)...(357): Xaa = selenocysteine or cysteine
MHVAQPAVVLASSRGIASFVCEYASPGKATEVRVTVLRQADSQVTEVXAATYMMGNELTFLDDSIXTGTSSGNQVNLTIQGLRAMDTGLYICKVELMYPPPYYLGIGNGTQIYVIDPEPXPDSDQEPKSSDKTHTSPPSPAPELLGGSSVFLFPPKPKDTLMISRTPEVTCVVVDVSHEDPEVKFNWYVDGVEVHNAKTKPREEQYNSTYRVVSVLTVLHQDWLNGKEYKCKVSNKALPAPIEKTISKAKGQPREPQVYTLPPSRDELTKNQVSLTCLVKGFYPSDIAVEWESNGQPENNYKTTPPVLDSDGSFFLYSKLTVDKSRWQQGNVFSCSVMHEALHNHYTQKSLSLSPGK

SEQ ID NO: 1277 - protein, 357 aa, Artificial Sequence
  Synthesized sequence with two or more selenocysteine residues substituted for two or more cysteine residues
  VARIANT (1)...(357): Xaa = selenocysteine or cysteine
MHVAQPAVVLASSRGIASFVCEYASPGKATEVRVTVLRQADSQVTEVXAATYMMGNELTFLDDSIXTGTSSGNQVNLTIQGLRAMDTGLYICKVELMYPPPYYLGIGNGTQIYVIDPEPCPDSDQEPKSSDKTHTSPPSPAPELLGGSSVFLFPPKPKDTLMISRTPEVTCVVVDVSHEDPEVKFNWYVDGVEVHNAKTKPREEQYNSTYRVVSVLTVLHQDWLNGKEYKCKVSNKALPAPIEKTISKAKGQPREPQVYTLPPSRDELTKNQVSLTXLVKGFYPSDIAVEWESNGQPENNYKTTPPVLDSDGSFFLYSKLTVDKSRWQQGNVFSXSVMHEALHNHYTQKSLSLSPGK

SEQ ID NO: 1278 - protein, 357 aa, Artificial Sequence
  Synthesized sequence with two or more selenocysteine residues substituted for two or more cysteine residues
  VARIANT (1)...(357): Xaa = selenocysteine or cysteine
MHVAQPAVVLASSRGIASFVCEYASPGKATEVRVTVLRQADSQVTEVCAATYMMGNELTFLDDSICTGTSSGNQVNLTIQGLRAMDTGLYICKVELMYPPPYYLGIGNGTQIYVIDPEPXPDSDQEPKSSDKTHTSPPSPAPELLGGSSVFLFPPKPKDTLMISRTPEVTCVVVDVSHEDPEVKFNWYVDGVEVHNAKTKPREEQYNSTYRVVSVLTVLHQDWLNGKEYKCKVSNKALPAPIEKTISKAKGQPREPQVYTLPPSRDELTKNQVSLTXLVKGFYPSDIAVEWESNGQPENNYKTTPPVLDSDGSFFLYSKLTVDKSRWQQGNVFSXSVMHEALHNHYTQKSLSLSPGK

SEQ ID NO: 1279 - protein, 357 aa, Artificial Sequence
  Synthesized sequence with two or more selenocysteine residues substituted for two or more cysteine residues
  VARIANT (1)...(357): Xaa = selenocysteine or cysteine
MHVAQPAVVLASSRGIASFVXEYASPGKATEVRVTVLRQADSQVTEVXAATYMMGNELTFLDDSIXTGTSSGNQVNLTIQGLRAMDTGLYIXKVELMYPPPYYLGIGNGTQIYVIDPEPXPDSDQEPKSSDKTHTSPPSPAPELLGGSSVFLFPPKPKDTLMISRTPEVTCVVVDVSHEDPEVKFNWYVDGVEVHNAKTKPREEQYNSTYRVVSVLTVLHQDWLNGKEYKCKVSNKALPAPIEKTISKAKGQPREPQVYTLPPSRDELTKNQVSLTCLVKGFYPSDIAVEWESNGQPENNYKTTPPVLDSDGSFFLYSKLTVDKSRWQQGNVFSCSVMHEALHNHYTQKSLSLSPGK

SEQ ID NO: 1280 - protein, 357 aa, Artificial Sequence
  Synthesized sequence with two or more selenocysteine residues substituted for two or more cysteine residues
  VARIANT (1)...(357): Xaa = selenocysteine or cysteine
MHVAQPAVVLASSRGIASFVXEYASPGKATEVRVTVLRQADSQVTEVXAATYMMGNELTFLDDSIXTGTSSGNQVNLTIQGLRAMDTGLYIXKVELMYPPPYYLGIGNGTQIYVIDPEPCPDSDQEPKSSDKTHTSPPSPAPELLGGSSVFLFPPKPKDTLMISRTPEVTCVVVDVSHEDPEVKFNWYVDGVEVHNAKTKPREEQYNSTYRVVSVLTVLHQDWLNGKEYKCKVSNKALPAPIEKTISKAKGQPREPQVYTLPPSRDELTKNQVSLTXLVKGFYPSDIAVEWESNGQPENNYKTTPPVLDSDGSFFLYSKLTVDKSRWQQGNVFSXSVMHEALHNHYTQKSLSLSPGK

SEQ ID NO: 1281 - protein, 357 aa, Artificial Sequence
  Synthesized sequence with two or more selenocysteine residues substituted for two or more cysteine residues
  VARIANT (1)...(357): Xaa = selenocysteine or cysteine
MHVAQPAVVLASSRGIASFVCEYASPGKATEVRVTVLRQADSQVTEVXAATYMMGNELTFLDDSIXTGTSSGNQVNLTIQGLRAMDTGLYICKVELMYPPPYYLGIGNGTQIYVIDPEPXPDSDQEPKSSDKTHTSPPSPAPELLGGSSVFLFPPKPKDTLMISRTPEVTCVVVDVSHEDPEVKFNWYVDGVEVHNAKTKPREEQYNSTYRVVSVLTVLHQDWLNGKEYKCKVSNKALPAPIEKTISKAKGQPREPQVYTLPPSRDELTKNQVSLTXLVKGFYPSDIAVEWESNGQPENNYKTTPPVLDSDGSFFLYSKLTVDKSRWQQGNVFSXSVMHEALHNHYTQKSLSLSPGK

SEQ ID NO: 1282 - protein, 165 aa, Artificial Sequence
  Synthesized sequence with two or more selenocysteine residues substituted for two or more cysteine residues
  VARIANT (1)...(165): Xaa = selenocysteine or cysteine
XDLPQTHSLGSRRTLMLLAQMRRISLFSCLKDRHDFGFPQEEFGNQFQKAETIPVLHEMIQQIFNLFSTKDSSAAWDETLLDKFYTELYQQLNDLEAXVIQGVGVTETPLMKEDSILAVRKYFQRITLYLKEKKYSPCAWEVVRAEIMRSFSLSTNLQESLRSKE

SEQ ID NO: 1283 - protein, 165 aa, Artificial Sequence
  Synthesized sequence with two or more selenocysteine residues substituted for two or more cysteine residues
  VARIANT (1)...(165): Xaa = selenocysteine or cysteine
CDLPQTHSLGSRRTLMLLAQMRRISLFSXLKDRHDFGFPQEEFGNQFQKAETIPVLHEMIQQIFNLFSTKDSSAAWDETLLDKFYTELYQQLNDLEACVIQGVGVTETPLMKEDSILAVRKYFQRITLYLKEKKYSPXAWEVVRAEIMRSFSLSTNLQESLRSKE

SEQ ID NO: 1284 - protein, 165 aa, Artificial Sequence
  Synthesized sequence with two or more selenocysteine residues substituted for two or more cysteine residues
  VARIANT (1)...(165): Xaa = selenocysteine or cysteine
XDLPQTHSLGSRRTLMLLAQMRKISLFSCLKDRHDFGFPQEEFGNQFQKAETIPVLHEMIQQIFNLFSTKDSSAAWDETLLDKFYTELYQQLNDLEAXVIQGVGVTETPLMKEDSILAVRKYFQRITLYLKEKKYSPCAWEVVRAEIMRSFSLSTNLQESLRSKE

SEQ ID NO: 1285 - protein, 165 aa, Artificial Sequence
  Synthesized sequence with two or more selenocysteine residues substituted for two or more cysteine residues
  VARIANT (1)...(165): Xaa = selenocysteine or cysteine
CDLPQTHSLGSRRTLMLLAQMRKISLFSXLKDRHDFGFPQEEFGNQFQKAETIPVLHEMIQQIFNLFSTKDSSAAWDETLLDKFYTELYQQLNDLEACVIQGVGVTETPLMKEDSILAVRKYFQRITLYLKEKKYSPXAWEVVRAEIMRSFSLSTNLQESLRSKE

SEQ ID NO: 1286 - protein, 165 aa, Artificial Sequence
  Synthesized sequence with two or more selenocysteine residues substituted for two or more cysteine residues
  VARIANT (1)...(165): Xaa = selenocysteine or cysteine
XDLPQTHSLGSRRTLMLLAQMRRISLFSCLKDRHDFGFPQEEFGNQFQKAETIPVLHEMIQQIFNLFSTKDSSAAWDETLLDKFYTELYQQLNDLEAXVIQGVGVTETPLMNEDSILAVRKYFQRITLYLKEKKYSPCAWEVVRAEIMRSFSLSTNLQESLRSKE

SEQ ID NO: 1287 - protein, 165 aa, Artificial Sequence
  Synthesized sequence with two or more selenocysteine residues substituted for two or more cysteine residues
  VARIANT (1)...(165): Xaa = selenocysteine or cysteine
CDLPQTHSLGSRRTLMLLAQMRRISLFSXLKDRHDFGFPQEEFGNQFQKAETIPVLHEMIQQIFNLFSTKDSSAAWDETLLDKFYTELYQQLNDLEACVIQGVGVTETPLMNEDSILAVRKYFQRITLYLKEKKYSPXAWEVVRAEIMRSFSLSTNLQESLRSKE

SEQ ID NO: 1288 - protein, 1296 aa, Artificial Sequence
  Synthesized sequence with two or more selenocysteine residues substituted for two or more cysteine residues
  VARIANT (1)...(1296): Xaa = selenocysteine or cysteine
MPFVNKQFNYKDPVNGVDIAYIKIPNVGQMQPVKAFKIHNKIWVIPERDTFTNPEEGDLNPPPEAKQVPVSYYDSTYLSTDNEKDNYLKGVTKLFERIYSTDLGRMLLTSIVRGIPFWGGSTIDTELKVIDTNCINVIQPDGSYRSEELNLVIIGPSADIIQFECKSFGHEVLNLTRNGYGSTQYIRFSPDFTFGFEESLEVDTNPLLGAGKFATDPAVTLAHELIHAGHRLYGIAINPNRVFKVNTNAYYEMSGLEVSFEELRTFGGHDAKFIDSLQENEFRLYYYNKFKDIASTLNKAKSIVGTTASLQYMKNVFKEKYLLSEDTSGKFSVDKLKFDKLYKMLTEIYTEDNFVKFFKVLNRKTYLNFDKAVFKINIVPKVNYTIYDGFNLRNTNLAANFNGQNTEINNMNFTKLKNFTGLFEFYKLLXVRGIITSKTKSLDKGYNKALNDLXIKVNNWDLFFSPSEDNFTNDLNKGEEITSDTNIEAAEENISLDLIQQYYLTFNFDNEPENISIENLSSDIIGQLELMPNIERFPNGKKYELDKYTMFHYLRAQEFEHGKSRIALTNSVNEALLNPSRVYTFFSSDYVKKVNKATEAAMFLGWVEQLVYDFTDETSEVSTTDKIADITIIIPYIGPALNIGNMLYKDDFVGALIFSGAVILLEFIPEIAIPVLGTFALVSYIANKVLTVQTIDNALSKRNEKWDEVYKYIVTNWLAKVNTQIDLIRKKMKEALENQAEATKAIINYQYNQYTEEEKNNINFNIDDLSSKLNESINKAMININKFLNQCSVSYLMNSMIPYGVKRLEDFDASLKDALLKYIYDNRGTLIGQVDRLKDKVNNTLSTDIPFQLSKYVDNQRLLSTFTEYIKNIINTSILNLRYESNHLIDLSRYASKINIGSKVNFDPIDKNQIQLFNLESSKIEVILKNAIVYNSMYENFSTSFWIRIPKYFNSISLNNEYTIINCMENNSGWKVSLNYGEIIWTLQDTQEIKQRVVFKYSQMINISDYINRWIFVTITNNRLNNSKIYINGRLIDQKPISNLGNIHASNNIMFKLDGCRDTHRYIWIKYFNLFDKELNEKEIKDLYDNQSNSGILKDFWGDYLQYDKPYYMLNLYDPNKYVDVNNVGIRGYMYLKGPRGSVMTTNIYLNSSLYRGTKFIIKKYASGNKDNIVRNNDRVYINVVVKNKEYRLATNASQAGVEKILSALEIPDVGNLSQVVVMKSKNDQGITNKCKMNLQDNNGNDIGFIGFHQFNNIAKLVASNWYNRQIERSSRTLGCSWEFIPVDDGWGERPL

SEQ ID NO: 1289 - protein, 1296 aa, Artificial Sequence
  Synthesized sequence with two or more selenocysteine residues substituted for two or more cysteine residues
  VARIANT (1)...(1296): Xaa = selenocysteine or cysteine
MPFVNKQFNYKDPVNGVDIAYIKIPNVGQMQPVKAFKIHNKIWVIPERDTFTNPEEGDLNPPPEAKQVPVSYYDSTYLSTDNEKDNYLKGVTKLFERIYSTDLGRMLLTSIVRGIPFWGGSTIDTELKVIDTNCINVIQPDGSYRSEELNLVIIGPSADIIQFECKSFGHEVLNLTRNGYGSTQYIRFSPDFTFGFEESLEVDTNPLLGAGKFATDPAVTLAHELIHAGHRLYGIAINPNRVFKVNTNAYYEMSGLEVSFEELRTFGGHDAKFIDSLQENEFRLYYYNKFKDIASTLNKAKSIVGTTASLQYMKNVFKEKYLLSEDTSGKFSVDKLKFDKLYKMLTEIYTEDNFVKFFKVLNRKTYLNFDKAVFKINIVPKVNYTIYDGFNLRNTNLAANFNGQNTEINNMNFTKLKNFTGLFEFYKLLCVRGIITSKTKSLDKGYNKALNDLCIKVNNWDLFFSPSEDNFTNDLNKGEEITSDTNIEAAEENISLDLIQQYYLTFNFDNEPENISIENLSSDIIGQLELMPNIERFPNGKKYELDKYTMFHYLRAQEFEHGKSRIALTNSVNEALLNPSRVYTFFSSDYVKKVNKATEAAMFLGWVEQLVYDFTDETSEVSTTDKIADITIIIPYIGPALNIGNMLYKDDFVGALIFSGAVILLEFIPEIAIPVLGTFALVSYIANKVLTVQTIDNALSKRNEKWDEVYKYIVTNWLAKVNTQIDLIRKKMKEALENQAEATKAIINYQYNQYTEEEKNNINFNIDDLSSKLNESINKAMININKFLNQCSVSYLMNSMIPYGVKRLEDFDASLKDALLKYIYDNRGTLIGQVDRLKDKVNNTLSTDIPFQLSKYVDNQRLLSTFTEYIKNIINTSILNLRYESNHLIDLSRYASKINIGSKVNFDPIDKNQIQLFNLESSKIEVILKNAIVYNSMYENFSTSFWIRIPKYFNSISLNNEYTIINCMENNSGWKVSLNYGEIIWTLQDTQEIKQRVVFKYSQMINISDYINRWIFVTITNNRLNNSKIYINGRLIDQKPISNLGNIHASNNIMFKLDGCRDTHRYIWIKYFNLFDKELNEKEIKDLYDNQSNSGILKDFWGDYLQYDKPYYMLNLYDPNKYVDVNNVGIRGYMYLKGPRGSVMTTNIYLNSSLYRGTKFIIKKYASGNKDNIVRNNDRVYINVVVKNKEYRLATNASQAGVEKILSALEIPDVGNLSQVVVMKSKNDQGITNKXKMNLQDNNGNDIGFIGFHQFNNIAKLVASNWYNRQIERSSRTLGXSWEFIPVDDGWGERPL

SEQ ID NO: 1290 - protein, 19 aa, Artificial Sequence
  Synthesized sequence with two or more selenocysteine residues substituted for two or more cysteine residues
  VARIANT (1)...(19): Xaa = selenocysteine or cysteine
APSFDXGKPQVEPKKCPGR

SEQ ID NO: 1291 - protein, 19 aa, Artificial Sequence
  Synthesized sequence with two or more selenocysteine residues substituted for two or more cysteine residues
  VARIANT (1)...(19): Xaa = selenocysteine or cysteine
APSFDCGKPQVEPKKXPGR

SEQ ID NO: 1292 - protein, 19 aa, Artificial Sequence
  Synthesized sequence with two or more selenocysteine residues substituted for two or more cysteine residues
  VARIANT (1)...(19): Xaa = selenocysteine or cysteine
APSFDXGKPQVEPKKXPGR

SEQ ID NO: 1293 - protein, 357 aa, Artificial Sequence
  Synthesized sequence with two or more selenocysteine residues substituted for two or more cysteine residues
  VARIANT (1)...(357): Xaa = selenocysteine or cysteine
MHVAQPAVVLASSRGIASFVXEYASPGKYTEVRVTVLRQADSQVTEVCAATYMMGNELTFLDDSICTGTSSGNQVNLTIQGLRAMDTGLYIXKVELMYPPPYYEGIGNGTQIYVIDPEPCPDSDQEPKSSDKTHTSPPSPAPELLGGSSVFLFPPKPKDTLMISRTPEVTCVVVDVSHEDPEVKFNWYVDGVEVHNAKTKPREEQYNSTYRVVSVLTVLHQDWLNGKEYKCKVSNKALPAPIEKTISKAKGQPREPQVYTLPPSRDELTKNQVSLTCLVKGFYPSDIAVEWESNGQPENNYKTTPPVLDSDGSFFLYSKLTVDKSRWQQGNVFSCSVMHEALHNHYTQKSLSLSPGK

SEQ ID NO: 1294 - protein, 357 aa, Artificial Sequence
  Synthesized sequence with two or more selenocysteine residues substituted for two or more cysteine residues
  VARIANT (1)...(357): Xaa = selenocysteine or cysteine
MHVAQPAVVLASSRGIASFVCEYASPGKYTEVRVTVLRQADSQVTEVXAATYMMGNELTFLDDSIXTGTSSGNQVNLTIQGLRAMDTGLYICKVELMYPPPYYEGIGNGTQIYVIDPEPCPDSDQEPKSSDKTHTSPPSPAPELLGGSSVFLFPPKPKDTLMISRTPEVTCVVVDVSHEDPEVKFNWYVDGVEVHNAKTKPREEQYNSTYRVVSVLTVLHQDWLNGKEYKCKVSNKALPAPIEKTISKAKGQPREPQVYTLPPSRDELTKNQVSLTCLVKGFYPSDIAVEWESNGQPENNYKTTPPVLDSDGSFFLYSKLTVDKSRWQQGNVFSCSVMHEALHNHYTQKSLSLSPGK

SEQ ID NO: 1295 - protein, 357 aa, Artificial Sequence
  Synthesized sequence with two or more selenocysteine residues substituted for two or more cysteine residues
  VARIANT (1)...(357): Xaa = selenocysteine or cysteine
MHVAQPAVVLASSRGIASFVCEYASPGKYTEVRVTVLRQADSQVTEVCAATYMMGNELTFLDDSICTGTSSGNQVNLTIQGLRAMDTGLYICKVELMYPPPYYEGIGNGTQIYVIDPEPXPDSDQEPKSSDKTHTSPPSPAPELLGGSSVFLFPPKPKDTLMISRTPEVTCVVVDVSHEDPEVKFNWYVDGVEVHNAKTKPREEQYNSTYRVVSVLTVLHQDWLNGKEYKCKVSNKALPAPIEKTISKAKGQPREPQVYTLPPSRDELTKNQVSLTCLVKGFYPSDIAVEWESNGQPENNYKTTPPVLDSDGSFFLYSKLTVDKSRWQQGNVFSCSVMHEALHNHYTQKSLSLSPGK

SEQ ID NO: 1296 - protein, 357 aa, Artificial Sequence
  Synthesized sequence with two or more selenocysteine residues substituted for two or more cysteine residues
  VARIANT (1)...(357): Xaa = selenocysteine or cysteine
MHVAQPAVVLASSRGIASFVCEYASPGKYTEVRVTVLRQADSQVTEVCAATYMMGNELTFLDDSICTGTSSGNQVNLTIQGLRAMDTGLYICKVELMYPPPYYEGIGNGTQIYVIDPEPCPDSDQEPKSSDKTHTSPPSPAPELLGGSSVFLFPPKPKDTLMISRTPEVTCVVVDVSHEDPEVKFNWYVDGVEVHNAKTKPREEQYNSTYRVVSVLTVLHQDWLNGKEYKCKVSNKALPAPIEKTISKAKGQPREPQVYTLPPSRDELTKNQVSLTXLVKGFYPSDIAVEWESNGQPENNYKTTPPVLDSDGSFFLYSKLTVDKSRWQQGNVFSXSVMHEALHNHYTQKSLSLSPGK

SEQ ID NO: 1297 - protein, 357 aa, Artificial Sequence
  Synthesized sequence with two or more selenocysteine residues substituted for two or more cysteine residues
  VARIANT (1)...(357): Xaa = selenocysteine or cysteine
MHVAQPAVVLASSRGIASFVXEYASPGKYTEVRVTVLRQADSQVTEVXAATYMMGNELTFLDDSIXTGTSSGNQVNLTIQGLRAMDTGLYIXKVELMYPPPYYEGIGNGTQIYVIDPEPCPDSDQEPKSSDKTHTSPPSPAPELLGGSSVFLFPPKPKDTLMISRTPEVTCVVVDVSHEDPEVKFNWYVDGVEVHNAKTKPREEQYNSTYRVVSVLTVLHQDWLNGKEYKCKVSNKALPAPIEKTISKAKGQPREPQVYTLPPSRDELTKNQVSLTCLVKGFYPSDIAVEWESNGQPENNYKTTPPVLDSDGSFFLYSKLTVDKSRWQQGNVFSCSVMHEALHNHYTQKSLSLSPGK

SEQ ID NO: 1298 - protein, 357 aa, Artificial Sequence
  Synthesized sequence with two or more selenocysteine residues substituted for two or more cysteine residues
  VARIANT (1)...(357): Xaa = selenocysteine or cysteine
MHVAQPAVVLASSRGIASFVXEYASPGKYTEVRVTVLRQADSQVTEVCAATYMMGNELTFLDDSICTGTSSGNQVNLTIQGLRAMDTGLYIXKVELMYPPPYYEGIGNGTQIYVIDPEPXPDSDQEPKSSDKTHTSPPSPAPELLGGSSVFLFPPKPKDTLMISRTPEVTCVVVDVSHEDPEVKFNWYVDGVEVHNAKTKPREEQYNSTYRVVSVLTVLHQDWLNGKEYKCKVSNKALPAPIEKTISKAKGQPREPQVYTLPPSRDELTKNQVSLTCLVKGFYPSDIAVEWESNGQPENNYKTTPPVLDSDGSFFLYSKLTVDKSRWQQGNVFSCSVMHEALHNHYTQKSLSLSPGK

SEQ ID NO: 1299 - protein, 357 aa, Artificial Sequence
  Synthesized sequence with two or more selenocysteine residues substituted for two or more cysteine residues
  VARIANT (1)...(357): Xaa = selenocysteine or cysteine
MHVAQPAVVLASSRGIASFVXEYASPGKYTEVRVTVLRQADSQVTEVCAATYMMGNELTFLDDSICTGTSSGNQVNLTIQGLRAMDTGLYIXKVELMYPPPYYEGIGNGTQIYVIDPEPCPDSDQEPKSSDKTHTSPPSPAPELLGGSSVFLFPPKPKDTLMISRTPEVTCVVVDVSHEDPEVKFNWYVDGVEVHNAKTKPREEQYNSTYRVVSVLTVLHQDWLNGKEYKCKVSNKALPAPIEKTISKAKGQPREPQVYTLPPSRDELTKNQVSLTXLVKGFYPSDIAVEWESNGQPENNYKTTPPVLDSDGSFFLYSKLTVDKSRWQQGNVFSXSVMHEALHNHYTQKSLSLSPGK

SEQ ID NO: 1300 - protein, 357 aa, Artificial Sequence
  Synthesized sequence with two or more selenocysteine residues substituted for two or more cysteine residues
  VARIANT (1)...(357): Xaa = selenocysteine or cysteine
MHVAQPAVVLASSRGIASFVCEYASPGKYTEVRVTVLRQADSQVTEVXAATYMMGNELTFLDDSIXTGTSSGNQVNLTIQGLRAMDTGLYICKVELMYPPPYYEGIGNGTQIYVIDPEPXPDSDQEPKSSDKTHTSPPSPAPELLGGSSVFLFPPKPKDTLMISRTPEVTCVVVDVSHEDPEVKFNWYVDGVEVHNAKTKPREEQYNSTYRVVSVLTVLHQDWLNGKEYKCKVSNKALPAPIEKTISKAKGQPREPQVYTLPPSRDELTKNQVSLTCLVKGFYPSDIAVEWESNGQPENNYKTTPPVLDSDGSFFLYSKLTVDKSRWQQGNVFSCSVMHEALHNHYTQKSLSLSPGK

SEQ ID NO: 1301 - protein, 357 aa, Artificial Sequence
  Synthesized sequence with two or more selenocysteine residues substituted for two or more cysteine residues
  VARIANT (1)...(357): Xaa = selenocysteine or cysteine
MHVAQPAVVLASSRGIASFVCEYASPGKYTEVRVTVLRQADSQVTEVXAATYMMGNELTFLDDSIXTGTSSGNQVNLTIQGLRAMDTGLYICKVELMYPPPYYEGIGNGTQIYVIDPEPCPDSDQEPKSSDKTHTSPPSPAPELLGGSSVFLFPPKPKDTLMISRTPEVTCVVVDVSHEDPEVKFNWYVDGVEVHNAKTKPREEQYNSTYRVVSVLTVLHQDWLNGKEYKCKVSNKALPAPIEKTISKAKGQPREPQVYTLPPSRDELTKNQVSLTXLVKGFYPSDIAVEWESNGQPENNYKTTPPVLDSDGSFFLYSKLTVDKSRWQQGNVFSXSVMHEALHNHYTQKSLSLSPGK

SEQ ID NO: 1302 - protein, 357 aa, Artificial Sequence
  Synthesized sequence with two or more selenocysteine residues substituted for two or more cysteine residues
  VARIANT (1)...(357): Xaa = selenocysteine or cysteine
MHVAQPAVVLASSRGIASFVCEYASPGKYTEVRVTVLRQADSQVTEVCAATYMMGNELTFLDDSICTGTSSGNQVNLTIQGLRAMDTGLYICKVELMYPPPYYEGIGNGTQIYVIDPEPXPDSDQEPKSSDKTHTSPPSPAPELLGGSSVFLFPPKPKDTLMISRTPEVTCVVVDVSHEDPEVKFNWYVDGVEVHNAKTKPREEQYNSTYRVVSVLTVLHQDWLNGKEYKCKVSNKALPAPIEKTISKAKGQPREPQVYTLPPSRDELTKNQVSLTXLVKGFYPSDIAVEWESNGQPENNYKTTPPVLDSDGSFFLYSKLTVDKSRWQQGNVFSXSVMHEALHNHYTQKSLSLSPGK

SEQ ID NO: 1303 - protein, 357 aa, Artificial Sequence
  Synthesized sequence with two or more selenocysteine residues substituted for two or more cysteine residues
  VARIANT (1)...(357): Xaa = selenocysteine or cysteine
MHVAQPAVVLASSRGIASFVXEYASPGKYTEVRVTVLRQADSQVTEVXAATYMMGNELTFLDDSIXTGTSSGNQVNLTIQGLRAMDTGLYIXKVELMYPPPYYEGIGNGTQIYVIDPEPXPDSDQEPKSSDKTHTSPPSPAPELLGGSSVFLFPPKPKDTLMISRTPEVTCVVVDVSHEDPEVKFNWYVDGVEVHNAKTKPREEQYNSTYRVVSVLTVLHQDWLNGKEYKCKVSNKALPAPIEKTISKAKGQPREPQVYTLPPSRDELTKNQVSLTCLVKGFYPSDIAVEWESNGQPENNYKTTPPVLDSDGSFFLYSKLTVDKSRWQQGNVFSCSVMHEALHNHYTQKSLSLSPGK

SEQ ID NO: 1304 - protein, 357 aa, Artificial Sequence
  Synthesized sequence with two or more selenocysteine residues substituted for two or more cysteine residues
  VARIANT (1)...(357): Xaa = selenocysteine or cysteine
MHVAQPAVVLASSRGIASFVXEYASPGKYTEVRVTVLRQADSQVTEVXAATYMMGNELTFLDDSIXTGTSSGNQVNLTIQGLRAMDTGLYIXKVELMYPPPYYEGIGNGTQIYVIDPEPCPDSDQEPKSSDKTHTSPPSPAPELLGGSSVFLFPPKPKDTLMISRTPEVTCVVVDVSHEDPEVKFNWYVDGVEVHNAKTKPREEQYNSTYRVVSVLTVLHQDWLNGKEYKCKVSNKALPAPIEKTISKAKGQPREPQVYTLPPSRDELTKNQVSLTXLVKGFYPSDIAVEWESNGQPENNYKTTPPVLDSDGSFFLYSKLTVDKSRWQQGNVFSXSVMHEALHNHYTQKSLSLSPGK

SEQ ID NO: 1305 - protein, 357 aa, Artificial Sequence
  Synthesized sequence with two or more selenocysteine residues substituted for two or more cysteine residues
  VARIANT (1)...(357): Xaa = selenocysteine or cysteine
MHVAQPAVVLASSRGIASFVXEYASPGKYTEVRVTVLRQADSQVTEVCAATYMMGNELTFLDDSICTGTSSGNQVNLTIQGLRAMDTGLYIXKVELMYPPPYYEGIGNGTQIYVIDPEPXPDSDQEPKSSDKTHTSPPSPAPELLGGSSVFLFPPKPKDTLMISRTPEVTCVVVDVSHEDPEVKFNWYVDGVEVHNAKTKPREEQYNSTYRVVSVLTVLHQDWLNGKEYKCKVSNKALPAPIEKTISKAKGQPREPQVYTLPPSRDELTKNQVSLTXLVKGFYPSDIAVEWESNGQPENNYKTTPPVLDSDGSFFLYSKLTVDKSRWQQGNVFSXSVMHEALHNHYTQKSLSLSPGK

SEQ ID NO: 1306 - protein, 357 aa, Artificial Sequence
  Synthesized sequence with two or more selenocysteine residues substituted for two or more cysteine residues
  VARIANT (1)...(357): Xaa = selenocysteine or cysteine
MHVAQPAVVLASSRGIASFVCEYASPGKYTEVRVTVLRQADSQVTEVXAATYMMGNELTFLDDSIXTGTSSGNQVNLTIQGLRAMDTGLYICKVELMYPPPYYEGIGNGTQIYVIDPEPXPDSDQEPKSSDKTHTSPPSPAPELLGGSSVFLFPPKPKDTLMISRTPEVTCVVVDVSHEDPEVKFNWYVDGVEVHNAKTKPREEQYNSTYRVVSVLTVLHQDWLNGKEYKCKVSNKALPAPIEKTISKAKGQPREPQVYTLPPSRDELTKNQVSLTXLVKGFYPSDIAVEWESNGQPENNYKTTPPVLDSDGSFFLYSKLTVDKSRWQQGNVFSXSVMHEALHNHYTQKSLSLSPGK

SEQ ID NO: 1307 - protein, 357 aa, Artificial Sequence; identical to SEQ ID NO: 1218
  Synthesized sequence with two or more selenocysteine residues substituted for two or more cysteine residues
  VARIANT (1)...(357): Xaa = selenocysteine or cysteine

SEQ ID NO: 1308 - protein, 431 aa, Artificial Sequence
  Synthesized sequence with two or more selenocysteine residues substituted for two or more cysteine residues
  VARIANT (1)...(431): Xaa = selenocysteine or cysteine
SDTGRPFVEMYSEIPEIIHMTEGRELVIPXRVTSPNITVTLKKFPLDTLIPDGKRIIWDSRKGFIISNATYKEIGLLTXEATVNGHLYKTNYLTHRQTNTIIDVVLSPSHGIELSVGEKLVLNCTARTELNVGIDFNWEYPSSKHQHKKLVNRDLKTQSGSEMKKFLSTLTIDGVTRSDQGLYTCAASSGLMTKKNSTFVRVHEKDKTHTCPPCPAPELLGGPSVFLFPPKPKDTLMISRTPEVTCVVVDVSHEDPEVKFNWYVDGVEVHNAKTKPREEQYNSTYRVVSVLTVLHQDWLNGKEYKCKVSNKALPAPIEKTISKAKGQPREPQVYTLPPSRDELTKNQVSLTCLVKGFYPSDIAVEWESNGQPENNYKTTPPVLDSDGSFFLYSKLTVDKSRWQQGNVFSCSVMHEALHNHYTQKSLSLSPG

SEQ ID NO: 1309 - protein, 431 aa, Artificial Sequence
  Synthesized sequence with two or more selenocysteine residues substituted for two or more cysteine residues
  VARIANT (1)...(431): Xaa = selenocysteine or cysteine
SDTGRPFVEMYSEIPEIIHMTEGRELVIPCRVTSPNITVTLKKFPLDTLIPDGKRIIWDSRKGFIISNATYKEIGLLTCEATVNGHLYKTNYLTHRQTNTIIDVVLSPSHGIELSVGEKLVLNXTARTELNVGIDFNWEYPSSKHQHKKLVNRDLKTQSGSEMKKFLSTLTIDGVTRSDQGLYTXAASSGLMTKKNSTFVRVHEKDKTHTCPPCPAPELLGGPSVFLFPPKPKDTLMISRTPEVTCVVVDVSHEDPEVKFNWYVDGVEVHNAKTKPREEQYNSTYRVVSVLTVLHQDWLNGKEYKCKVSNKALPAPIEKTISKAKGQPREPQVYTLPPSRDELTKNQVSLTCLVKGFYPSDIAVEWESNGQPENNYKTTPPVLDSDGSFFLYSKLTVDKSRWQQGNVFSCSVMHEALHNHYTQKSLSLSPG

SEQ ID NO: 1310 - protein, 431 aa, Artificial Sequence
  Synthesized sequence with two or more selenocysteine residues substituted for two or more cysteine residues
  VARIANT (1)...(431): Xaa = selenocysteine or cysteine
SDTGRPFVEMYSEIPEIIHMTEGRELVIPCRVTSPNITVTLKKFPLDTLIPDGKRIIWDSRKGFIISNATYKEIGLLTCEATVNGHLYKTNYLTHRQTNTIIDVVLSPSHGIELSVGEKLVLNCTARTELNVGIDFNWEYPSSKHQHKKLVNRDLKTQSGSEMKKFLSTLTIDGVTRSDQGLYTCAASSGLMTKKNSTFVRVHEKDKTHTCPPCPAPELLGGPSVFLFPPKPKDTLMISRTPEVTCVVVDVSHEDPEVKFNWYVDGVEVHNAKTKPREEQYNSTYRVVSVLTVLHQDWLNGKEYKCKVSNKALPAPIEKTISKAKGQPREPQVYTLPPSRDELTKNQVSLTXLVKGFYPSDIAVEWESNGQPENNYKTTPPVLDSDGSFFLYSKLTVDKSRWQQGNVFSXSVMHEALHNHYTQKSLSLSPG

SEQ ID NO: 1311 - protein, 431 aa, Artificial Sequence
  Synthesized sequence with two or more selenocysteine residues substituted for two or more cysteine residues
  VARIANT (1)...(431): Xaa = selenocysteine or cysteine
SDTGRPFVEMYSEIPEIIHMTEGRELVIPCRVTSPNITVTLKKFPLDTLIPDGKRIIWDSRKGFIISNATYKEIGLLTCEATVNGHLYKTNYLTHRQTNTIIDVVLSPSHGIELSVGEKLVLNCTARTELNVGIDFNWEYPSSKHQHKKLVNRDLKTQSGSEMKKFLSTLTIDGVTRSDQGLYTCAASSGLMTKKNSTFVRVHEKDKTHTXPPCPAPELLGGPSVFLFPPKPKDTLMISRTPEVTCVVVDVSHEDPEVKFNWYVDGVEVHNAKTKPREEQYNSTYRVVSVLTVLHQDWLNGKEYKCKVSNKALPAPIEKTISKAKGQPREPQVYTLPPSRDELTKNQVSLTCLVKGFYPSDIAVEWESNGQPENNYKTTPPVLDSDGSFFLYSKLTVDKSRWQQGNVFSCSVMHEALHNHYTQKSLSLSPG

SEQ ID NO: 1312 - protein, 431 aa, Artificial Sequence
  Synthesized sequence with two or more selenocysteine residues substituted for two or more cysteine residues
  VARIANT (1)...(431): Xaa = selenocysteine or cysteine
SDTGRPFVEMYSEIPEIIHMTEGRELVIPCRVTSPNITVTLKKFPLDTLIPDGKRIIWDSRKGFIISNATYKEIGLLTCEATVNGHLYKTNYLTHRQTNTIIDVVLSPSHGIELSVGEKLVLNCTARTELNVGIDFNWEYPSSKHQHKKLVNRDLKTQSGSEMKKFLSTLTIDGVTRSDQGLYTCAASSGLMTKKNSTFVRVHEKDKTHTCPPXPAPELLGGPSVFLFPPKPKDTLMISRTPEVTCVVVDVSHEDPEVKFNWYVDGVEVHNAKTKPREEQYNSTYRVVSVLTVLHQDWLNGKEYKCKVSNKALPAPIEKTISKAKGQPREPQVYTLPPSRDELTKNQVSLTCLVKGFYPSDIAVEWESNGQPENNYKTTPPVLDSDGSFFLYSKLTVDKSRWQQGNVFSCSVMHEALHNHYTQKSLSLSPG

SEQ ID NO: 1313 - protein, 431 aa, Artificial Sequence
  Synthesized sequence with two or more selenocysteine residues substituted for two or more cysteine residues
  VARIANT (1)...(431): Xaa = selenocysteine or cysteine
SDTGRPFVEMYSEIPEIIHMTEGRELVIPXRVTSPNITVTLKKFPLDTLIPDGKRIIWDSRKGFIISNATYKEIGLLTXEATVNGHLYKTNYLTHRQTNTIIDVVLSPSHGIELSVGEKLVLNXTARTELNVGIDFNWEYPSSKHQHKKLVNRDLKTQSGSEMKKFLSTLTIDGVTRSDQGLYTXAASSGLMTKKNSTFVRVHEKDKTHTCPPCPAPELLGGPSVFLFPPKPKDTLMISRTPEVTCVVVDVSHEDPEVKFNWYVDGVEVHNAKTKPREEQYNSTYRVVSVLTVLHQDWLNGKEYKCKVSNKALPAPIEKTISKAKGQPREPQVYTLPPSRDELTKNQVSLTCLVKGFYPSDIAVEWESNGQPENNYKTTPPVLDSDGSFFLYSKLTVDKSRWQQGNVFSCSVMHEALHNHYTQKSLSLSPG

SEQ ID NO: 1314 - protein, 431 aa, Artificial Sequence
  Synthesized sequence with two or more selenocysteine residues substituted for two or more cysteine residues
  VARIANT (1)...(431): Xaa = selenocysteine or cysteine
SDTGRPFVEMYSEIPEIIHMTEGRELVIPXRVTSPNITVTLKKFPLDTLIPDGKRIIWDSRKGFIISNATYKEIGLLTXEATVNGHLYKTNYLTHRQTNTIIDVVLSPSHGIELSVGEKLVLNCTARTELNVGIDFNWEYPSSKHQHKKLVNRDLKTQSGSEMKKFLSTLTIDGVTRSDQGLYTCAASSGLMTKKNSTFVRVHEKDKTHTCPPCPAPELLGGPSVFLFPPKPKDTLMISRTPEVTCVVVDVSHEDPEVKFNWYVDGVEVHNAKTKPREEQYNSTYRVVSVLTVLHQDWLNGKEYKCKVSNKALPAPIEKTISKAKGQPREPQVYTLPPSRDELTKNQVSLTXLVKGFYPSDIAVEWESNGQPENNYKTTPPVLDSDGSFFLYSKLTVDKSRWQQGNVFSXSVMHEALHNHYTQKSLSLSPG

SEQ ID NO: 1315 - protein, 431 aa, Artificial Sequence
  Synthesized sequence with two or more selenocysteine residues substituted for two or more cysteine residues
  VARIANT (1)...(431): Xaa = selenocysteine or cysteine
SDTGRPFVEMYSEIPEIIHMTEGRELVIPXRVTSPNITVTLKKFPLDTLIPDGKRIIWDSRKGFIISNATYKEIGLLTXEATVNGHLYKTNYLTHRQTNTIIDVVLSPSHGIELSVGEKLVLNCTARTELNVGIDFNWEYPSSKHQHKKLVNRDLKTQSGSEMKKFLSTLTIDGVTRSDQGLYTCAASSGLMTKKNSTFVRVHEKDKTHTXPPCPAPELLGGPSVFLFPPKPKDTLMISRTPEVTCVVVDVSHEDPEVKFNWYVDGVEVHNAKTKPREEQYNSTYRVVSVLTVLHQDWLNGKEYKCKVSNKALPAPIEKTISKAKGQPREPQVYTLPPSRDELTKNQVSLTCLVKGFYPSDIAVEWESNGQPENNYKTTPPVLDSDGSFFLYSKLTVDKSRWQQGNVFSCSVMHEALHNHYTQKSLSLSPG

SEQ ID NO: 1316 - protein, 431 aa, Artificial Sequence
  Synthesized sequence with two or more selenocysteine residues substituted for two or more cysteine residues
  VARIANT (1)...(431): Xaa = selenocysteine or cysteine
SDTGRPFVEMYSEIPEIIHMTEGRELVIPXRVTSPNITVTLKKFPLDTLIPDGKRIIWDSRKGFIISNATYKEIGLLTXEATVNGHLYKTNYLTHRQTNTIIDVVLSPSHGIELSVGEKLVLNCTARTELNVGIDFNWEYPSSKHQHKKLVNRDLKTQSGSEMKKFLSTLTIDGVTRSDQGLYTCAASSGLMTKKNSTFVRVHEKDKTHTCPPXPAPELLGGPSVFLFPPKPKDTLMISRTPEVTCVVVDVSHEDPEVKFNWYVDGVEVHNAKTKPREEQYNSTYRVVSVLTVLHQDWLNGKEYKCKVSNKALPAPIEKTISKAKGQPREPQVYTLPPSRDELTKNQVSLTCLVKGFYPSDIAVEWESNGQPENNYKTTPPVLDSDGSFFLYSKLTVDKSRWQQGNVFSCSVMHEALHNHYTQKSLSLSPG

SEQ ID NO: 1317 - protein, 431 aa, Artificial Sequence
  Synthesized sequence with two or more selenocysteine residues substituted for two or more cysteine residues
  VARIANT (1)...(431): Xaa = selenocysteine or cysteine
SDTGRPFVEMYSEIPEIIHMTEGRELVIPCRVTSPNITVTLKKFPLDTLIPDGKRIIWDSRKGFIISNATYKEIGLLTCEATVNGHLYKTNYLTHRQTNTIIDVVLSPSHGIELSVGEKLVLNXTARTELNVGIDFNWEYPSSKHQHKKLVNRDLKTQSGSEMKKFLSTLTIDGVTRSDQGLYTXAASSGLMTKKNSTFVRVHEKDKTHTCPPCPAPELLGGPSVFLFPPKPKDTLMISRTPEVTCVVVDVSHEDPEVKFNWYVDGVEVHNAKTKPREEQYNSTYRVVSVLTVLHQDWLNGKEYKCKVSNKALPAPIEKTISKAKGQPREPQVYTLPPSRDELTKNQVSLTXLVKGFYPSDIAVEWESNGQPENNYKTTPPVLDSDGSFFLYSKLTVDKSRWQQGNVFSXSVMHEALHNHYTQKSLSLSPG

SEQ ID NO: 1318 - protein, 431 aa, Artificial Sequence
  Synthesized sequence with two or more selenocysteine residues substituted for two or more cysteine residues
  VARIANT (1)...(431): Xaa = selenocysteine or cysteine
SDTGRPFVEMYSEIPEIIHMTEGRELVIPCRVTSPNITVTLKKFPLDTLIPDGKRIIWDSRKGFIISNATYKEIGLLTCEATVNGHLYKTNYLTHRQTNTIIDVVLSPSHGIELSVGEKLVLNXTARTELNVGIDFNWEYPSSKHQHKKLVNRDLKTQSGSEMKKFLSTLTIDGVTRSDQGLYTXAASSGLMTKKNSTFVRVHEKDKTHTXPPCPAPELLGGPSVFLFPPKPKDTLMISRTPEVTCVVVDVSHEDPEVKFNWYVDGVEVHNAKTKPREEQYNSTYRVVSVLTVLHQDWLNGKEYKCKVSNKALPAPIEKTISKAKGQPREPQVYTLPPSRDELTKNQVSLTCLVKGFYPSDIAVEWESNGQPENNYKTTPPVLDSDGSFFLYSKLTVDKSRWQQGNVFSCSVMHEALHNHYTQKSLSLSPG

SEQ ID NO: 1319 - protein, 431 aa, Artificial Sequence
  Synthesized sequence with two or more selenocysteine residues substituted for two or more cysteine residues
  VARIANT (1)...(431): Xaa = selenocysteine or cysteine
SDTGRPFVEMYSEIPEIIHMTEGRELVIPCRVTSPNITVTLKKFPLDTLIPDGKRIIWDSRKGFIISNATYKEIGLLTCEATVNGHLYKTNYLTHRQTNTIIDVVLSPSHGIELSVGEKLVLNXTARTELNVGIDFNWEYPSSKHQHKKLVNRDLKTQSGSEMKKFLSTLTIDGVTRSDQGLYTXAASSGLMTKKNSTFVRVHEKDKTHTCPPXPAPELLGGPSVFLFPPKPKDTLMISRTPEVTCVVVDVSHEDPEVKFNWYVDGVEVHNAKTKPREEQYNSTYRVVSVLTVLHQDWLNGKEYKCKVSNKALPAPIEKTISKAKGQPREPQVYTLPPSRDELTKNQVSLTCLVKGFYPSDIAVEWESNGQPENNYKTTPPVLDSDGSFFLYSKLTVDKSRWQQGNVFSCSVMHEALHNHYTQKSLSLSPG

SEQ ID NO: 1320 - protein, 431 aa, Artificial Sequence
  Synthesized sequence with two or more selenocysteine residues substituted for two or more cysteine residues
  VARIANT (1)...(431): Xaa = selenocysteine or cysteine
SDTGRPFVEMYSEIPEIIHMTEGRELVIPCRVTSPNITVTLKKFPLDTLIPDGKRIIWDSRKGFIISNATYKEIGLLTCEATVNGHLYKTNYLTHRQTNTIIDVVLSPSHGIELSVGEKLVLNCTARTELNVGIDFNWEYPSSKHQHKKLVNRDLKTQSGSEMKKFLSTLTIDGVTRSDQGLYTCAASSGLMTKKNSTFVRVHEKDKTHTXPPCPAPELLGGPSVFLFPPKPKDTLMISRTPEVTCVVVDVSHEDPEVKFNWYVDGVEVHNAKTKPREEQYNSTYRVVSVLTVLHQDWLNGKEYKCKVSNKALPAPIEKTISKAKGQPREPQVYTLPPSRDELTKNQVSLTXLVKGFYPSDIAVEWESNGQPENNYKTTPPVLDSDGSFFLYSKLTVDKSRWQQGNVFSXSVMHEALHNHYTQKSLSLSPG

SEQ ID NO: 1321 - protein, 431 aa, Artificial Sequence
  Synthesized sequence with two or more selenocysteine residues substituted for two or more cysteine residues
  VARIANT (1)...(431): Xaa = selenocysteine or cysteine
SDTGRPFVEMYSEIPEIIHMTEGRELVIPCRVTSPNITVTLKKFPLDTLIPDGKRIIWDSRKGFIISNATYKEIGLLTCEATVNGHLYKTNYLTHRQTNTIIDVVLSPSHGIELSVGEKLVLNCTARTELNVGIDFNWEYPSSKHQHKKLVNRDLKTQSGSEMKKFLSTLTIDGVTRSDQGLYTCAASSGLMTKKNSTFVRVHEKDKTHTCPPXPAPELLGGPSVFLFPPKPKDTLMISRTPEVTCVVVDVSHEDPEVKFNWYVDGVEVHNAKTKPREEQYNSTYRVVSVLTVLHQDWLNGKEYKCKVSNKALPAPIEKTISKAKGQPREPQVYTLPPSRDELTKNQVSLTXLVKGFYPSDIAVEWESNGQPENNYKTTPPVLDSDGSFFLYSKLTVDKSRWQQGNVFSXSVMHEALHNHYTQKSLSLSPG

SEQ ID NO: 1322 - protein, 431 aa, Artificial Sequence
  Synthesized sequence with two or more selenocysteine residues substituted for two or more cysteine residues
  VARIANT (1)...(431): Xaa = selenocysteine or cysteine
SDTGRPFVEMYSEIPEIIHMTEGRELVIPCRVTSPNITVTLKKFPLDTLIPDGKRIIWDSRKGFIISNATYKEIGLLTCEATVNGHLYKTNYLTHRQTNTIIDVVLSPSHGIELSVGEKLVLNCTARTELNVGIDFNWEYPSSKHQHKKLVNRDLKTQSGSEMKKFLSTLTIDGVTRSDQGLYTCAASSGLMTKKNSTFVRVHEKDKTHTXPPXPAPELLGGPSVFLFPPKPKDTLMISRTPEVTCVVVDVSHEDPEVKFNWYVDGVEVHNAKTKPREEQYNSTYRVVSVLTVLHQDWLNGKEYKCKVSNKALPAPIEKTISKAKGQPREPQVYTLPPSRDELTKNQVSLTCLVKGFYPSDIAVEWESNGQPENNYKTTPPVLDSDGSFFLYSKLTVDKSRWQQGNVFSCSVMHEALHNHYTQKSLSLSPG

SEQ ID NO: 1323 - protein, 431 aa, Artificial Sequence
  Synthesized sequence with two or more selenocysteine residues substituted for two or more cysteine residues
  VARIANT (1)...(431): Xaa = selenocysteine or cysteine
SDTGRPFVEMYSEIPEIIHMTEGRELVIPXRVTSPNITVTLKKFPLDTLIPDGKRIIWDSRKGFIISNATYKEIGLLTXEATVNGHLYKTNYLTHRQTNTIIDVVLSPSHGIELSVGEKLVLNXTARTELNVGIDFNWEYPSSKHQHKKLVNRDLKTQSGSEMKKFLSTLTIDGVTRSDQGLYTXAASSGLMTKKNSTFVRVHEKDKTHTCPPCPAPELLGGPSVFLFPPKPKDTLMISRTPEVTCVVVDVSHEDPEVKFNWYVDGVEVHNAKTKPREEQYNSTYRVVSVLTVLHQDWLNGKEYKCKVSNKALPAPIEKTISKAKGQPREPQVYTLPPSRDELTKNQVSLTXLVKGFYPSDIAVEWESNGQPENNYKTTPPVLDSDGSFFLYSKLTVDKSRWQQGNVFSXSVMHEALHNHYTQKSLSLSPG

SEQ ID NO: 1324 - protein, 431 aa, Artificial Sequence
  Synthesized sequence with two or more selenocysteine residues substituted for two or more cysteine residues
  VARIANT (1)...(431): Xaa = selenocysteine or cysteine
SDTGRPFVEMYSEIPEIIHMTEGRELVIPXRVTSPNITVTLKKFPLDTLIPDGKRIIWDSRKGFIISNATYKEIGLLTXEATVNGHLYKTNYLTHRQTNTIIDVVLSPSHGIELSVGEKLVLNXTARTELNVGIDFNWEYPSSKHQHKKLVNRDLKTQSGSEMKKFLSTLTIDGVTRSDQGLYTXAASSGLMTKKNSTFVRVHEKDKTHTXPPCPAPELLGGPSVFLFPPKPKDTLMISRTPEVTCVVVDVSHEDPEVKFNWYVDGVEVHNAKTKPREEQYNSTYRVVSVLTVLHQDWLNGKEYKCKVSNKALPAPIEKTISKAKGQPREPQVYTLPPSRDELTKNQVSLTCLVKGFYPSDIAVEWESNGQPENNYKTTPPVLDSDGSFFLYSKLTVDKSRWQQGNVFSCSVMHEALHNHYTQKSLSLSPG

SEQ ID NO: 1325 - protein, 431 aa, Artificial Sequence
  Synthesized sequence with two or more selenocysteine residues substituted for two or more cysteine residues
  VARIANT (1)...(431): Xaa = selenocysteine or cysteine
SDTGRPFVEMYSEIPEIIHMTEGRELVIPXRVTSPNITVTLKKFPLDTLIPDGKRIIWDSRKGFIISNATYKEIGLLTXEATVNGHLYKTNYLTHRQTNTIIDVVLSPSHGIELSVGEKLVLNXTARTELNVGIDFNWEYPSSKHQHKKLVNRDLKTQSGSEMKKFLSTLTIDGVTRSDQGLYTXAASSGLMTKKNSTFVRVHEKDKTHTCPPXPAPELLGGPSVFLFPPKPKDTLMISRTPEVTCVVVDVSHEDPEVKFNWYVDGVEVHNAKTKPREEQYNSTYRVVSVLTVLHQDWLNGKEYKCKVSNKALPAPIEKTISKAKGQPREPQVYTLPPSRDELTKNQVSLTCLVKGFYPSDIAVEWESNGQPENNYKTTPPVLDSDGSFFLYSKLTVDKSRWQQGNVFSCSVMHEALHNHYTQKSLSLSPG

SEQ ID NO: 1326 - protein, 431 aa, Artificial Sequence
  Synthesized sequence with two or more selenocysteine residues substituted for two or more cysteine residues
  VARIANT (1)...(431): Xaa = selenocysteine or cysteine
SDTGRPFVEMYSEIPEIIHMTEGRELVIPXRVTSPNITVTLKKFPLDTLIPDGKRIIWDSRKGFIISNATYKEIGLLTXEATVNGHLYKTNYLTHRQTNTIIDVVLSPSHGIELSVGEKLVLNCTARTELNVGIDFNWEYPSSKHQHKKLVNRDLKTQSGSEMKKFLSTLTIDGVTRSDQGLYTCAASSGLMTKKNSTFVRVHEKDKTHTXPPCPAPELLGGPSVFLFPPKPKDTLMISRTPEVTCVVVDVSHEDPEVKFNWYVDGVEVHNAKTKPREEQYNSTYRVVSVLTVLHQDWLNGKEYKCKVSNKALPAPIEKTISKAKGQPREPQVYTLPPSRDELTKNQVSLTXLVKGFYPSDIAVEWESNGQPENNYKTTPPVLDSDGSFFLYSKLTVDKSRWQQGNVFSXSVMHEALHNHYTQKSLSLSPG

SEQ ID NO: 1327 - protein, 431 aa, Artificial Sequence
  Synthesized sequence with two or more selenocysteine residues substituted for two or more cysteine residues
  VARIANT (1)...(431): Xaa = selenocysteine or cysteine
SDTGRPFVEMYSEIPEIIHMTEGRELVIPXRVTSPNITVTLKKFPLDTLIPDGKRIIWDSRKGFIISNATYKEIGLLTXEATVNGHLYKTNYLTHRQTNTIIDVVLSPSHGIELSVGEKLVLNCTARTELNVGIDFNWEYPSSKHQHKKLVNRDLKTQSGSEMKKFLSTLTIDGVTRSDQGLYTCAASSGLMTKKNSTFVRVHEKDKTHTCPPXPAPELLGGPSVFLFPPKPKDTLMISRTPEVTCVVVDVSHEDPEVKFNWYVDGVEVHNAKTKPREEQYNSTYRVVSVLTVLHQDWLNGKEYKCKVSNKALPAPIEKTISKAKGQPREPQVYTLPPSRDELTKNQVSLTXLVKGFYPSDIAVEWESNGQPENNYKTTPPVLDSDGSFFLYSKLTVDKSRWQQGNVFSXSVMHEALHNHYTQKSLSLSPG

SEQ ID NO: 1328 - protein, 431 aa, Artificial Sequence
  Synthesized sequence with two or more selenocysteine residues substituted for two or more cysteine residues
  VARIANT (1)...(431): Xaa = selenocysteine or cysteine
SDTGRPFVEMYSEIPEIIHMTEGRELVIPXRVTSPNITVTLKKFPLDTLIPDGKRIIWDSRKGFIISNATYKEIGLLTXEATVNGHLYKTNYLTHRQTNTIIDVVLSPSHGIELSVGEKLVLNCTARTELNVGIDFNWEYPSSKHQHKKLVNRDLKTQSGSEMKKFLSTLTIDGVTRSDQGLYTCAASSGLMTKKNSTFVRVHEKDKTHTXPPXPAPELLGGPSVFLFPPKPKDTLMISRTPEVTCVVVDVSHEDPEVKFNWYVDGVEVHNAKTKPREEQYNSTYRVVSVLTVLHQDWLNGKEYKCKVSNKALPAPIEKTISKAKGQPREPQVYTLPPSRDELTKNQVSLTCLVKGFYPSDIAVEWESNGQPENNYKTTPPVLDSDGSFFLYSKLTVDKSRWQQGNVFSCSVMHEALHNHYTQKSLSLSPG

SEQ ID NO: 1329 - protein, 431 aa, Artificial Sequence
  Synthesized sequence with two or more selenocysteine residues substituted for two or more cysteine residues
  VARIANT (1)...(431): Xaa = selenocysteine or cysteine
SDTGRPFVEMYSEIPEIIHMTEGRELVIPCRVTSPNITVTLKKFPLDTLIPDGKRIIWDSRKGFIISNATYKEIGLLTCEATVNGHLYKTNYLTHRQTNTIIDVVLSPSHGIELSVGEKLVLNXTARTELNVGIDFNWEYPSSKHQHKKLVNRDLKTQSGSEMKKFLSTLTIDGVTRSDQGLYTXAASSGLMTKKNSTFVRVHEKDKTHTXPPCPAPELLGGPSVFLFPPKPKDTLMISRTPEVTCVVVDVSHEDPEVKFNWYVDGVEVHNAKTKPREEQYNSTYRVVSVLTVLHQDWLNGKEYKCKVSNKALPAPIEKTISKAKGQPREPQVYTLPPSRDELTKNQVSLTXLVKGFYPSDIAVEWESNGQPENNYKTTPPVLDSDGSFFLYSKLTVDKSRWQQGNVFSXSVMHEALHNHYTQKSLSLSPG

SEQ ID NO: 1330 - protein, 431 aa, Artificial Sequence
  Synthesized sequence with two or more selenocysteine residues substituted for two or more cysteine residues
  VARIANT (1)...(431): Xaa = selenocysteine or cysteine
SDTGRPFVEMYSEIPEIIHMTEGRELVIPCRVTSPNITVTLKKFPLDTLIPDGKRIIWDSRKGFIISNATYKEIGLLTCEATVNGHLYKTNYLTHRQTNTIIDVVLSPSHGIELSVGEKLVLNXTARTELNVGIDFNWEYPSSKHQHKKLVNRDLKTQSGSEMKKFLSTLTIDGVTRSDQGLYTXAASSGLMTKKNSTFVRVHEKDKTHTCPPXPAPELLGGPSVFLFPPKPKDTLMISRTPEVTCVVVDVSHEDPEVKFNWYVDGVEVHNAKTKPREEQYNSTYRVVSVLTVLHQDWLNGKEYKCKVSNKALPAPIEKTISKAKGQPREPQVYTLPPSRDELTKNQVSLTXLVKGFYPSDIAVEWESNGQPENNYKTTPPVLDSDGSFFLYSKLTVDKSRWQQGNVFSXSVMHEALHNHYTQKSLSLSPG

SEQ ID NO: 1331 - protein, 431 aa, Artificial Sequence
  Synthesized sequence with two or more selenocysteine residues substituted for two or more cysteine residues
  VARIANT (1)...(431): Xaa = selenocysteine or cysteine
SDTGRPFVEMYSEIPEIIHMTEGRELVIPCRVTSPNITVTLKKFPLDTLIPDGKRIIWDSRKGFIISNATYKEIGLLTCEATVNGHLYKTNYLTHRQTNTIIDVVLSPSHGIELSVGEKLVLNCTARTELNVGIDFNWEYPSSKHQHKKLVNRDLKTQSGSEMKKFLSTLTIDGVTRSDQGLYTCAASSGLMTKKNSTFVRVHEKDKTHTXPPXPAPELLGGPSVFLFPPKPKDTLMISRTPEVTCVVVDVSHEDPEVKFNWYVDGVEVHNAKTKPREEQYNSTYRVVSVLTVLHQDWLNGKEYKCKVSNKALPAPIEKTISKAKGQPREPQVYTLPPSRDELTKNQVSLTXLVKGFYPSDIAVEWESNGQPENNYKTTPPVLDSDGSFFLYSKLTVDKSRWQQGNVFSXSVMHEALHNHYTQKSLSLSPG

SEQ ID NO: 1332 - protein, 431 aa, Artificial Sequence
  Synthesized sequence with two or more selenocysteine residues substituted for two or more cysteine residues
  VARIANT (1)...(431): Xaa = selenocysteine or cysteine
SDTGRPFVEMYSEIPEIIHMTEGRELVIPXRVTSPNITVTLKKFPLDTLIPDGKRIIWDSRKGFIISNATYKEIGLLTXEATVNGHLYKTNYLTHRQTNTIIDVVLSPSHGIELSVGEKLVLNXTARTELNVGIDFNWEYPSSKHQHKKLVNRDLKTQSGSEMKKFLSTLTIDGVTRSDQGLYTXAASSGLMTKKNSTFVRVHEKDKTHTXPPCPAPELLGGPSVFLFPPKPKDTLMISRTPEVTCVVVDVSHEDPEVKFNWYVDGVEVHNAKTKPREEQYNSTYRVVSVLTVLHQDWLNGKEYKCKVSNKALPAPIEKTISKAKGQPREPQVYTLPPSRDELTKNQVSLTXLVKGFYPSDIAVEWESNGQPENNYKTTPPVLDSDGSFFLYSKLTVDKSRWQQGNVFSXSVMHEALHNHYTQKSLSLSPG

SEQ ID NO: 1333 - protein, 431 aa, Artificial Sequence
  Synthesized sequence with two or more selenocysteine residues substituted for two or more cysteine residues
  VARIANT (1)...(431): Xaa = selenocysteine or cysteine
SDTGRPFVEMYSEIPEIIHMTEGRELVIPXRVTSPNITVTLKKFPLDTLIPDGKRIIWDSRKGFIISNATYKEIGLLTXEATVNGHLYKTNYLTHRQTNTIIDVVLSPSHGIELSVGEKLVLNXTARTELNVGIDFNWEYPSSKHQHKKLVNRDLKTQSGSEMKKFLSTLTIDGVTRSDQGLYTXAASSGLMTKKNSTFVRVHEKDKTHTCPPXPAPELLGGPSVFLFPPKPKDTLMISRTPEVTCVVVDVSHEDPEVKFNWYVDGVEVHNAKTKPREEQYNSTYRVVSVLTVLHQDWLNGKEYKCKVSNKALPAPIEKTISKAKGQPREPQVYTLPPSRDELTKNQVSLTXLVKGFYPSDIAVEWESNGQPENNYKTTPPVLDSDGSFFLYSKLTVDKSRWQQGNVFSXSVMHEALHNHYTQKSLSLSPG

SEQ ID NO: 1334 - protein, 431 aa, Artificial Sequence
  Synthesized sequence with two or more selenocysteine residues substituted for two or more cysteine residues
  VARIANT (1)...(431): Xaa = selenocysteine or cysteine
SDTGRPFVEMYSEIPEIIHMTEGRELVIPXRVTSPNITVTLKKFPLDTLIPDGKRIIWDSRKGFIISNATYKEIGLLTXEATVNGHLYKTNYLTHRQTNTIIDVVLSPSHGIELSVGEKLVLNXTARTELNVGIDFNWEYPSSKHQHKKLVNRDLKTQSGSEMKKFLSTLTIDGVTRSDQGLYTXAASSGLMTKKNSTFVRVHEKDKTHTXPPXPAPELLGGPSVFLFPPKPKDTLMISRTPEVTCVVVDVSHEDPEVKFNWYVDGVEVHNAKTKPREEQYNSTYRVVSVLTVLHQDWLNGKEYKCKVSNKALPAPIEKTISKAKGQPREPQVYTLPPSRDELTKNQVSLTCLVKGFYPSDIAVEWESNGQPENNYKTTPPVLDSDGSFFLYSKLTVDKSRWQQGNVFSCSVMHEALHNHYTQKSLSLSPG

SEQ ID NO: 1335 - protein, 431 aa, Artificial Sequence
  Synthesized sequence with two or more selenocysteine residues substituted for two or more cysteine residues
  VARIANT (1)...(431): Xaa = selenocysteine or cysteine
SDTGRPFVEMYSEIPEIIHMTEGRELVIPXRVTSPNITVTLKKFPLDTLIPDGKRIIWDSRKGFIISNATYKEIGLLTXEATVNGHLYKTNYLTHRQTNTIIDVVLSPSHGIELSVGEKLVLNCTARTELNVGIDFNWEYPSSKHQHKKLVNRDLKTQSGSEMKKFLSTLTIDGVTRSDQGLYTCAASSGLMTKKNSTFVRVHEKDKTHTXPPXPAPELLGGPSVFLFPPKPKDTLMISRTPEVTCVVVDVSHEDPEVKFNWYVDGVEVHNAKTKPREEQYNSTYRVVSVLTVLHQDWLNGKEYKCKVSNKALPAPIEKTISKAKGQPREPQVYTLPPSRDELTKNQVSLTXLVKGFYPSDIAVEWESNGQPENNYKTTPPVLDSDGSFFLYSKLTVDKSRWQQGNVFSXSVMHEALHNHYTQKSLSLSPG

SEQ ID NO: 1336 - protein, 431 aa, Artificial Sequence
  Synthesized sequence with two or more selenocysteine residues substituted for two or more cysteine residues
  VARIANT (1)...(431): Xaa = selenocysteine or cysteine
SDTGRPFVEMYSEIPEIIHMTEGRELVIPCRVTSPNITVTLKKFPLDTLIPDGKRIIWDSRKGFIISNATYKEIGLLTCEATVNGHLYKTNYLTHRQTNTIIDVVLSPSHGIELSVGEKLVLNXTARTELNVGIDFNWEYPSSKHQHKKLVNRDLKTQSGSEMKKFLSTLTIDGVTRSDQGLYTXAASSGLMTKKNSTFVRVHEKDKTHTXPPXPAPELLGGPSVFLFPPKPKDTLMISRTPEVTCVVVDVSHEDPEVKFNWYVDGVEVHNAKTKPREEQYNSTYRVVSVLTVLHQDWLNGKEYKCKVSNKALPAPIEKTISKAKGQPREPQVYTLPPSRDELTKNQVSLTXLVKGFYPSDIAVEWESNGQPENNYKTTPPVLDSDGSFFLYSKLTVDKSRWQQGNVFSXSVMHEALHNHYTQKSLSLSPG

SEQ ID NO: 1337 - protein, 431 aa, Artificial Sequence
  Synthesized sequence with two or more selenocysteine residues substituted for two or more cysteine residues
  VARIANT (1)...(431): Xaa = selenocysteine or cysteine
SDTGRPFVEMYSEIPEIIHMTEGRELVIPXRVTSPNITVTLKKFPLDTLIPDGKRIIWDSRKGFIISNATYKEIGLLTXEATVNGHLYKTNYLTHRQTNTIIDVVLSPSHGIELSVGEKLVLNXTARTELNVGIDFNWEYPSSKHQHKKLVNRDLKTQSGSEMKKFLSTLTIDGVTRSDQGLYTXAASSGLMTKKNSTFVRVHEKDKTHTXPPXPAPELLGGPSVFLFPPKPKDTLMISRTPEVTCVVVDVSHEDPEVKFNWYVDGVEVHNAKTKPREEQYNSTYRVVSVLTVLHQDWLNGKEYKCKVSNKALPAPIEKTISKAKGQPREPQVYTLPPSRDELTKNQVSLTXLVKGFYPSDIAVEWESNGQPENNYKTTPPVLDSDGSFFLYSKLTVDKSRWQQGNVFSXSVMHEALHNHYTQKSLSLSPG

SEQ ID NO: 1338 - protein, 230 aa, Artificial Sequence
  Synthesized sequence with two or more selenocysteine residues substituted for two or more cysteine residues
  VARIANT (1)...(230): Xaa = selenocysteine or cysteine
VVGGCVAHPHSWPWQVSLRTRFGMHFCGGTLISPEWVLTAAHCLEKSPRPSSYKVILGAHQEVNLEPHVQEIEVSRLFLEPTRKDIALLKLSSPAVITDKVIPAXLPSPNYVVADRTECFITGWGETQGTFGAGLLKEAQLPVIENKVCNRYEFLNGRVQSTELCAGHLAGGTDSCQGDSGGPLVCFEKDKYILQGVTSWGLGCARPNKPGVYVRVSRFVTWIEGVMRNN

SEQ ID NO: 1339 - protein, 230 aa, Artificial Sequence
  Synthesized sequence with two or more selenocysteine residues substituted for two or more cysteine residues
  VARIANT (1)...(230): Xaa = selenocysteine or cysteine
VVGGXVAHPHSWPWQVSLRTRFGMHFCGGTLISPEWVLTAAHCLEKSPRPSSYKVILGAHQEVNLEPHVQEIEVSRLFLEPTRKDIALLKLSSPAVITDKVIPACLPSPNYVVADRTECFITGWGETQGTFGAGLLKEAQLPVIENKVCNRYEFLNGRVQSTELCAGHLAGGTDSCQGDSGGPLVCFEKDKYILQGVTSWGLGCARPNKPGVYVRVSRFVTWIEGVMRNN

SEQ ID NO: 1340 - protein, 230 aa, Artificial Sequence
  Synthesized sequence with two or more selenocysteine residues substituted for two or more cysteine residues
  VARIANT (1)...(230): Xaa = selenocysteine or cysteine
VVGGCVAHPHSWPWQVSLRTRFGMHFXGGTLISPEWVLTAAHXLEKSPRPSSYKVILGAHQEVNLEPHVQEIEVSRLFLEPTRKDIALLKLSSPAVITDKVIPACLPSPNYVVADRTECFITGWGETQGTFGAGLLKEAQLPVIENKVCNRYEFLNGRVQSTELCAGHLAGGTDSCQGDSGGPLVCFEKDKYILQGVTSWGLGCARPNKPGVYVRVSRFVTWIEGVMRNN

SEQ ID NO: 1341 - protein, 230 aa, Artificial Sequence
  Synthesized sequence with two or more selenocysteine residues substituted for two or more cysteine residues
  VARIANT (1)...(230): Xaa = selenocysteine or cysteine
VVGGCVAHPHSWPWQVSLRTRFGMHFCGGTLISPEWVLTAAHCLEKSPRPSSYKVILGAHQEVNLEPHVQEIEVSRLFLEPTRKDIALLKLSSPAVITDKVIPACLPSPNYVVADRTEXFITGWGETQGTFGAGLLKEAQLPVIENKVCNRYEFLNGRVQSTELCAGHLAGGTDSCQGDSGGPLVXFEKDKYILQGVTSWGLGCARPNKPGVYVRVSRFVTWIEGVMRNN

SEQ ID NO: 1342 - protein, 230 aa, Artificial Sequence
  Synthesized sequence with two or more selenocysteine residues substituted for two or more cysteine residues
  VARIANT (1)...(230): Xaa = selenocysteine or cysteine
VVGGCVAHPHSWPWQVSLRTRFGMHFCGGTLISPEWVLTAAHCLEKSPRPSSYKVILGAHQEVNLEPHVQEIEVSRLFLEPTRKDIALLKLSSPAVITDKVIPACLPSPNYVVADRTECFITGWGETQGTFGAGLLKEAQLPVIENKVXNRYEFLNGRVQSTELXAGHLAGGTDSCQGDSGGPLVCFEKDKYILQGVTSWGLGCARPNKPGVYVRVSRFVTWIEGVMRNN

SEQ ID NO: 1343 - protein, 230 aa, Artificial Sequence
  Synthesized sequence with two or more selenocysteine residues substituted for two or more cysteine residues
  VARIANT (1)...(230): Xaa = selenocysteine or cysteine
VVGGCVAHPHSWPWQVSLRTRFGMHFCGGTLISPEWVLTAAHCLEKSPRPSSYKVILGAHQEVNLEPHVQEIEVSRLFLEPTRKDIALLKLSSPAVITDKVIPACLPSPNYVVADRTECFITGWGETQGTFGAGLLKEAQLPVIENKVCNRYEFLNGRVQSTELCAGHLAGGTDSXQGDSGGPLVCFEKDKYILQGVTSWGLGXARPNKPGVYVRVSRFVTWIEGVMRNN

SEQ ID NO: 1344 - protein, 230 aa, Artificial Sequence
  Synthesized sequence with two or more selenocysteine residues substituted for two or more cysteine residues
  VARIANT (1)...(230): Xaa = selenocysteine or cysteine
VVGGXVAHPHSWPWQVSLRTRFGMHFCGGTLISPEWVLTAAHCLEKSPRPSSYKVILGAHQEVNLEPHVQEIEVSRLFLEPTRKDIALLKLSSPAVITDKVIPAXLPSPNYVVADRTECFITGWGETQGTFGAGLLKEAQLPVIENKVCNRYEFLNGRVQSTELCAGHLAGGTDSCQGDSGGPLVCFEKDKYILQGVTSWGLGCARPNKPGVYVRVSRFVTWIEGVMRNN

SEQ ID NO: 1345 - protein, 230 aa, Artificial Sequence
  Synthesized sequence with two or more selenocysteine residues substituted for two or more cysteine residues
  VARIANT (1)...(230): Xaa = selenocysteine or cysteine
VVGGCVAHPHSWPWQVSLRTRFGMHFXGGTLISPEWVLTAAHXLEKSPRPSSYKVILGAHQEVNLEPHVQEIEVSRLFLEPTRKDIALLKLSSPAVITDKVIPAXLPSPNYVVADRTECFITGWGETQGTFGAGLLKEAQLPVIENKVCNRYEFLNGRVQSTELCAGHLAGGTDSCQGDSGGPLVCFEKDKYILQGVTSWGLGCARPNKPGVYVRVSRFVTWIEGVMRNN

SEQ ID NO: 1346 - protein, 230 aa, Artificial Sequence
  Synthesized sequence with two or more selenocysteine residues substituted for two or more cysteine residues
  VARIANT (1)...(230): Xaa = selenocysteine or cysteine
VVGGCVAHPHSWPWQVSLRTRFGMHFCGGTLISPEWVLTAAHCLEKSPRPSSYKVILGAHQEVNLEPHVQEIEVSRLFLEPTRKDIALLKLSSPAVITDKVIPAXLPSPNYVVADRTEXFITGWGETQGTFGAGLLKEAQLPVIENKVCNRYEFLNGRVQSTELCAGHLAGGTDSCQGDSGGPLVXFEKDKYILQGVTSWGLGCARPNKPGVYVRVSRFVTWIEGVMRNN

SEQ ID NO: 1347 - protein, 230 aa, Artificial Sequence
  Synthesized sequence with two or more selenocysteine residues substituted for two or more cysteine residues
  VARIANT (1)...(230): Xaa = selenocysteine or cysteine
VVGGCVAHPHSWPWQVSLRTRFGMHFCGGTLISPEWVLTAAHCLEKSPRPSSYKVILGAHQEVNLEPHVQEIEVSRLFLEPTRKDIALLKLSSPAVITDKVIPAXLPSPNYVVADRTECFITGWGETQGTFGAGLLKEAQLPVIENKVXNRYEFLNGRVQSTELXAGHLAGGTDSCQGDSGGPLVCFEKDKYILQGVTSWGLGCARPNKPGVYVRVSRFVTWIEGVMRNN

SEQ ID NO: 1348 - protein, 230 aa, Artificial Sequence
  Synthesized sequence with two or more selenocysteine residues substituted for two or more cysteine residues
  VARIANT (1)...(230): Xaa = selenocysteine or cysteine
VVGGCVAHPHSWPWQVSLRTRFGMHFCGGTLISPEWVLTAAHCLEKSPRPSSYKVILGAHQEVNLEPHVQEIEVSRLFLEPTRKDIALLKLSSPAVITDKVIPAXLPSPNYVVADRTECFITGWGETQGTFGAGLLKEAQLPVIENKVCNRYEFLNGRVQSTELCAGHLAGGTDSXQGDSGGPLVCFEKDKYILQGVTSWGLGXARPNKPGVYVRVSRFVTWIEGVMRNN

SEQ ID NO: 1349 - protein, 230 aa, Artificial Sequence
  Synthesized sequence with two or more selenocysteine residues substituted for two or more cysteine residues
  VARIANT (1)...(230): Xaa = selenocysteine or cysteine
VVGGXVAHPHSWPWQVSLRTRFGMHFXGGTLISPEWVLTAAHXLEKSPRPSSYKVILGAHQEVNLEPHVQEIEVSRLFLEPTRKDIALLKLSSPAVITDKVIPACLPSPNYVVADRTECFITGWGETQGTFGAGLLKEAQLPVIENKVCNRYEFLNGRVQSTELCAGHLAGGTDSCQGDSGGPLVCFEKDKYILQGVTSWGLGCARPNKPGVYVRVSRFVTWIEGVMRNN

SEQ ID NO: 1350 - protein, 230 aa, Artificial Sequence
  Synthesized sequence with two or more selenocysteine residues substituted for two or more cysteine residues
  VARIANT (1)...(230): Xaa = selenocysteine or cysteine
VVGGXVAHPHSWPWQVSLRTRFGMHFCGGTLISPEWVLTAAHCLEKSPRPSSYKVILGAHQEVNLEPHVQEIEVSRLFLEPTRKDIALLKLSSPAVITDKVIPACLPSPNYVVADRTEXFITGWGETQGTFGAGLLKEAQLPVIENKVCNRYEFLNGRVQSTELCAGHLAGGTDSCQGDSGGPLVXFEKDKYILQGVTSWGLGCARPNKPGVYVRVSRFVTWIEGVMRNN

SEQ ID NO: 1351 - protein, 230 aa, Artificial Sequence
  Synthesized sequence with two or more selenocysteine residues substituted for two or more cysteine residues
  VARIANT (1)...(230): Xaa = selenocysteine or cysteine
VVGGXVAHPHSWPWQVSLRTRFGMHFCGGTLISPEWVLTAAHCLEKSPRPSSYKVILGAHQEVNLEPHVQEIEVSRLFLEPTRKDIALLKLSSPAVITDKVIPACLPSPNYVVADRTECFITGWGETQGTFGAGLLKEAQLPVIENKVXNRYEFLNGRVQSTELXAGHLAGGTDSCQGDSGGPLVCFEKDKYILQGVTSWGLGCARPNKPGVYVRVSRFVTWIEGVMRNN

SEQ ID NO: 1352 - protein, 230 aa, Artificial Sequence
  Synthesized sequence with two or more selenocysteine residues substituted for two or more cysteine residues
  VARIANT (1)...(230): Xaa = selenocysteine or cysteine
VVGGXVAHPHSWPWQVSLRTRFGMHFCGGTLISPEWVLTAAHCLEKSPRPSSYKVILGAHQEVNLEPHVQEIEVSRLFLEPTRKDIALLKLSSPAVITDKVIPACLPSPNYVVADRTECFITGWGETQGTFGAGLLKEAQLPVIENKVCNRYEFLNGRVQSTELCAGHLAGGTDSXQGDSGGPLVCFEKDKYILQGVTSWGLGXARPNKPGVYVRVSRFVTWIEGVMRNN

SEQ ID NO: 1353 - protein, 230 aa, Artificial Sequence
  Synthesized sequence with two or more selenocysteine residues substituted for two or more cysteine residues
  VARIANT (1)...(230): Xaa = selenocysteine or cysteine
VVGGCVAHPHSWPWQVSLRTRFGMHFXGGTLISPEWVLTAAHXLEKSPRPSSYKVILGAHQEVNLEPHVQEIEVSRLFLEPTRKDIALLKLSSPAVITDKVIPACLPSPNYVVADRTEXFITGWGETQGTFGAGLLKEAQLPVIENKVCNRYEFLNGRVQSTELCAGHLAGGTDSCQGDSGGPLVXFEKDKYILQGVTSWGLGCARPNKPGVYVRVSRFVTWIEGVMRNN

SEQ ID NO: 1354 - protein, 230 aa, Artificial Sequence
  Synthesized sequence with two or more selenocysteine residues substituted for two or more cysteine residues
  VARIANT (1)...(230): Xaa = selenocysteine or cysteine
VVGGCVAHPHSWPWQVSLRTRFGMHFXGGTLISPEWVLTAAHXLEKSPRPSSYKVILGAHQEVNLEPHVQEIEVSRLFLEPTRKDIALLKLSSPAVITDKVIPACLPSPNYVVADRTECFITGWGETQGTFGAGLLKEAQLPVIENKVXNRYEFLNGRVQSTELXAGHLAGGTDSCQGDSGGPLVCFEKDKYILQGVTSWGLGCARPNKPGVYVRVSRFVTWIEGVMRNN

SEQ ID NO: 1355 - protein, 230 aa, Artificial Sequence
  Synthesized sequence with two or more selenocysteine residues substituted for two or more cysteine residues
  VARIANT (1)...(230): Xaa = selenocysteine or cysteine
VVGGCVAHPHSWPWQVSLRTRFGMHFXGGTLISPEWVLTAAHXLEKSPRPSSYKVILGAHQEVNLEPHVQEIEVSRLFLEPTRKDIALLKLSSPAVITDKVIPACLPSPNYVVADRTECFITGWGETQGTFGAGLLKEAQLPVIENKVCNRYEFLNGRVQSTELCAGHLAGGTDSXQGDSGGPLVCFEKDKYILQGVTSWGLGXARPNKPGVYVRVSRFVTWIEGVMRNN

SEQ ID NO: 1356 - protein, 230 aa, Artificial Sequence
  Synthesized sequence with two or more selenocysteine residues substituted for two or more cysteine residues
  VARIANT (1)...(230): Xaa = selenocysteine or cysteine
VVGGCVAHPHSWPWQVSLRTRFGMHFCGGTLISPEWVLTAAHCLEKSPRPSSYKVILGAHQEVNLEPHVQEIEVSRLFLEPTRKDIALLKLSSPAVITDKVIPACLPSPNYVVADRTEXFITGWGETQGTFGAGLLKEAQLPVIENKVXNRYEFLNGRVQSTELXAGHLAGGTDSCQGDSGGPLVXFEKDKYILQGVTSWGLGCARPNKPGVYVRVSRFVTWIEGVMRNN

SEQ ID NO: 1357 - protein, 230 aa, Artificial Sequence
  Synthesized sequence with two or more selenocysteine residues substituted for two or more cysteine residues
  VARIANT (1)...(230): Xaa = selenocysteine or cysteine
VVGGCVAHPHSWPWQVSLRTRFGMHFCGGTLISPEWVLTAAHCLEKSPRPSSYKVILGAHQEVNLEPHVQEIEVSRLFLEPTRKDIALLKLSSPAVITDKVIPACLPSPNYVVADRTEXFITGWGETQGTFGAGLLKEAQLPVIENKVCNRYEFLNGRVQSTELCAGHLAGGTDSXQGDSGGPLVXFEKDKYILQGVTSWGLGXARPNKPGVYVRVSRFVTWIEGVMRNN

SEQ ID NO: 1358 - protein, 230 aa, Artificial Sequence
  Synthesized sequence with two or more selenocysteine residues substituted for two or more cysteine residues
  VARIANT (1)...(230): Xaa = selenocysteine or cysteine
VVGGCVAHPHSWPWQVSLRTRFGMHFCGGTLISPEWVLTAAHCLEKSPRPSSYKVILGAHQEVNLEPHVQEIEVSRLFLEPTRKDIALLKLSSPAVITDKVIPACLPSPNYVVADRTECFITGWGETQGTFGAGLLKEAQLPVIENKVXNRYEFLNGRVQSTELXAGHLAGGTDSXQGDSGGPLVCFEKDKYILQGVTSWGLGXARPNKPGVYVRVSRFVTWIEGVMRNN

SEQ ID NO: 1359 - protein, 230 aa, Artificial Sequence
  Synthesized sequence with two or more selenocysteine residues substituted for two or more cysteine residues
  VARIANT (1)...(230): Xaa = selenocysteine or cysteine
VVGGXVAHPHSWPWQVSLRTRFGMHFXGGTLISPEWVLTAAHXLEKSPRPSSYKVILGAHQEVNLEPHVQEIEVSRLFLEPTRKDIALLKLSSPAVITDKVIPAXLPSPNYVVADRTECFITGWGETQGTFGAGLLKEAQLPVIENKVCNRYEFLNGRVQSTELCAGHLAGGTDSCQGDSGGPLVCFEKDKYILQGVTSWGLGCARPNKPGVYVRVSRFVTWIEGVMRNN

SEQ ID NO: 1360 - protein, 230 aa, Artificial Sequence
  Synthesized sequence with two or more selenocysteine residues substituted for two or more cysteine residues
  VARIANT (1)...(230): Xaa = selenocysteine or cysteine
VVGGXVAHPHSWPWQVSLRTRFGMHFCGGTLISPEWVLTAAHCLEKSPRPSSYKVILGAHQEVNLEPHVQEIEVSRLFLEPTRKDIALLKLSSPAVITDKVIPAXLPSPNYVVADRTEXFITGWGETQGTFGAGLLKEAQLPVIENKVCNRYEFLNGRVQSTELCAGHLAGGTDSCQGDSGGPLVXFEKDKYILQGVTSWGLGCARPNKPGVYVRVSRFVTWIEGVMRNN

SEQ ID NO: 1361 - protein, 230 aa, Artificial Sequence
  Synthesized sequence with two or more selenocysteine residues substituted for two or more cysteine residues
  VARIANT (1)...(230): Xaa = selenocysteine or cysteine
VVGGXVAHPHSWPWQVSLRTRFGMHFCGGTLISPEWVLTAAHCLEKSPRPSSYKVILGAHQEVNLEPHVQEIEVSRLFLEPTRKDIALLKLSSPAVITDKVIPAXLPSPNYVVADRTECFITGWGETQGTFGAGLLKEAQLPVIENKVXNRYEFLNGRVQSTELXAGHLAGGTDSCQGDSGGPLVCFEKDKYILQGVTSWGLGCARPNKPGVYVRVSRFVTWIEGVMRNN

SEQ ID NO: 1362 - protein, 230 aa, Artificial Sequence
  Synthesized sequence with two or more selenocysteine residues substituted for two or more cysteine residues
  VARIANT (1)...(230): Xaa = selenocysteine or cysteine
VVGGXVAHPHSWPWQVSLRTRFGMHFCGGTLISPEWVLTAAHCLEKSPRPSSYKVILGAHQEVNLEPHVQEIEVSRLFLEPTRKDIALLKLSSPAVITDKVIPAXLPSPNYVVADRTECFITGWGETQGTFGAGLLKEAQLPVIENKVCNRYEFLNGRVQSTELCAGHLAGGTDSXQGDSGGPLVCFEKDKYILQGVTSWGLGXARPNKPGVYVRVSRFVTWIEGVMRNN

SEQ ID NO: 1363 - protein, 230 aa, Artificial Sequence
  Synthesized sequence with two or more selenocysteine residues substituted for two or more cysteine residues
  VARIANT (1)...(230): Xaa = selenocysteine or cysteine
VVGGCVAHPHSWPWQVSLRTRFGMHFXGGTLISPEWVLTAAHXLEKSPRPSSYKVILGAHQEVNLEPHVQEIEVSRLFLEPTRKDIALLKLSSPAVITDKVIPAXLPSPNYVVADRTEXFITGWGETQGTFGAGLLKEAQLPVIENKVCNRYEFLNGRVQSTELCAGHLAGGTDSCQGDSGGPLVXFEKDKYILQGVTSWGLGCARPNKPGVYVRVSRFVTWIEGVMRNN

SEQ ID NO: 1364 - protein, 230 aa, Artificial Sequence
  Synthesized sequence with two or more selenocysteine residues substituted for two or more cysteine residues
  VARIANT (1)...(230): Xaa = selenocysteine or cysteine
VVGGCVAHPHSWPWQVSLRTRFGMHFXGGTLISPEWVLTAAHXLEKSPRPSSYKVILGAHQEVNLEPHVQEIEVSRLFLEPTRKDIALLKLSSPAVITDKVIPAXLPSPNYVVADRTECFITGWGETQGTFGAGLLKEAQLPVIENKVXNRYEFLNGRVQSTELXAGHLAGGTDSCQGDSGGPLVCFEKDKYILQGVTSWGLGCARPNKPGVYVRVSRFVTWIEGVMRNN

SEQ ID NO: 1365 - protein, 230 aa, Artificial Sequence
  Synthesized sequence with two or more selenocysteine residues substituted for two or more cysteine residues
  VARIANT (1)...(230): Xaa = selenocysteine or cysteine
VVGGCVAHPHSWPWQVSLRTRFGMHFXGGTLISPEWVLTAAHXLEKSPRPSSYKVILGAHQEVNLEPHVQEIEVSRLFLEPTRKDIALLKLSSPAVITDKVIPAXLPSPNYVVADRTECFITGWGETQGTFGAGLLKEAQLPVIENKVCNRYEFLNGRVQSTELCAGHLAGGTDSXQGDSGGPLVCFEKDKYILQGVTSWGLGXARPNKPGVYVRVSRFVTWIEGVMRNN

SEQ ID NO: 1366 - protein, 230 aa, Artificial Sequence
  Synthesized sequence with two or more selenocysteine residues substituted for two or more cysteine residues
  VARIANT (1)...(230): Xaa = selenocysteine or cysteine
VVGGCVAHPHSWPWQVSLRTRFGMHFCGGTLISPEWVLTAAHCLEKSPRPSSYKVILGAHQEVNLEPHVQEIEVSRLFLEPTRKDIALLKLSSPAVITDKVIPAXLPSPNYVVADRTEXFITGWGETQGTFGAGLLKEAQLPVIENKVXNRYEFLNGRVQSTELXAGHLAGGTDSCQGDSGGPLVXFEKDKYILQGVTSWGLGCARPNKPGVYVRVSRFVTWIEGVMRNN

SEQ ID NO: 1367 - protein, 230 aa, Artificial Sequence
  Synthesized sequence with two or more selenocysteine residues substituted for two or more cysteine residues
  VARIANT (1)...(230): Xaa = selenocysteine or cysteine
VVGGCVAHPHSWPWQVSLRTRFGMHFCGGTLISPEWVLTAAHCLEKSPRPSSYKVILGAHQEVNLEPHVQEIEVSRLFLEPTRKDIALLKLSSPAVITDKVIPAXLPSPNYVVADRTEXFITGWGETQGTFGAGLLKEAQLPVIENKVCNRYEFLNGRVQSTELCAGHLAGGTDSXQGDSGGPLVXFEKDKYILQGVTSWGLGXARPNKPGVYVRVSRFVTWIEGVMRNN

SEQ ID NO: 1368 - protein, 230 aa, Artificial Sequence
  Synthesized sequence with two or more selenocysteine residues substituted for two or more cysteine residues
  VARIANT (1)...(230): Xaa = selenocysteine or cysteine
VVGGCVAHPHSWPWQVSLRTRFGMHFCGGTLISPEWVLTAAHCLEKSPRPSSYKVILGAHQEVNLEPHVQEIEVSRLFLEPTRKDIALLKLSSPAVITDKVIPAXLPSPNYVVADRTECFITGWGETQGTFGAGLLKEAQLPVIENKVXNRYEFLNGRVQSTELXAGHLAGGTDSXQGDSGGPLVCFEKDKYILQGVTSWGLGXARPNKPGVYVRVSRFVTWIEGVMRNN

SEQ ID NO: 1369 - protein, 230 aa, Artificial Sequence
  Synthesized sequence with two or more selenocysteine residues substituted for two or more cysteine residues
  VARIANT (1)...(230): Xaa = selenocysteine or cysteine
VVGGXVAHPHSWPWQVSLRTRFGMHFXGGTLISPEWVLTAAHXLEKSPRPSSYKVILGAHQEVNLEPHVQEIEVSRLFLEPTRKDIALLKLSSPAVITDKVIPACLPSPNYVVADRTEXFITGWGETQGTFGAGLLKEAQLPVIENKVCNRYEFLNGRVQSTELCAGHLAGGTDSCQGDSGGPLVXFEKDKYILQGVTSWGLGCARPNKPGVYVRVSRFVTWIEGVMRNN

SEQ ID NO: 1370 - protein, 230 aa, Artificial Sequence
  Synthesized sequence with two or more selenocysteine residues substituted for two or more cysteine residues
  VARIANT (1)...(230): Xaa = selenocysteine or cysteine
VVGGXVAHPHSWPWQVSLRTRFGMHFXGGTLISPEWVLTAAHXLEKSPRPSSYKVILGAHQEVNLEPHVQEIEVSRLFLEPTRKDIALLKLSSPAVITDKVIPACLPSPNYVVADRTECFITGWGETQGTFGAGLLKEAQLPVIENKVXNRYEFLNGRVQSTELXAGHLAGGTDSCQGDSGGPLVCFEKDKYILQGVTSWGLGCARPNKPGVYVRVSRFVTWIEGVMRNN

SEQ ID NO: 1371 - protein, 230 aa, Artificial Sequence
  Synthesized sequence with two or more selenocysteine residues substituted for two or more cysteine residues
  VARIANT (1)...(230): Xaa = selenocysteine or cysteine
VVGGXVAHPHSWPWQVSLRTRFGMHFXGGTLISPEWVLTAAHXLEKSPRPSSYKVILGAHQEVNLEPHVQEIEVSRLFLEPTRKDIALLKLSSPAVITDKVIPACLPSPNYVVADRTECFITGWGETQGTFGAGLLKEAQLPVIENKVCNRYEFLNGRVQSTELCAGHLAGGTDSXQGDSGGPLVCFEKDKYILQGVTSWGLGXARPNKPGVYVRVSRFVTWIEGVMRNN

SEQ ID NO: 1372 - protein, 230 aa, Artificial Sequence
  Synthesized sequence with two or more selenocysteine residues substituted for two or more cysteine residues
  VARIANT (1)...(230): Xaa = selenocysteine or cysteine
VVGGXVAHPHSWPWQVSLRTRFGMHFCGGTLISPEWVLTAAHCLEKSPRPSSYKVILGAHQEVNLEPHVQEIEVSRLFLEPTRKDIALLKLSSPAVITDKVIPACLPSPNYVVADRTEXFITGWGETQGTFGAGLLKEAQLPVIENKVXNRYEFLNGRVQSTELXAGHLAGGTDSCQGDSGGPLVXFEKDKYILQGVTSWGLGCARPNKPGVYVRVSRFVTWIEGVMRNN

SEQ ID NO: 1373 - protein, 230 aa, Artificial Sequence
  Synthesized sequence with two or more selenocysteine residues substituted for two or more cysteine residues
  VARIANT (1)...(230): Xaa = selenocysteine or cysteine
VVGGXVAHPHSWPWQVSLRTRFGMHFCGGTLISPEWVLTAAHCLEKSPRPSSYKVILGAHQEVNLEPHVQEIEVSRLFLEPTRKDIALLKLSSPAVITDKVIPACLPSPNYVVADRTEXFITGWGETQGTFGAGLLKEAQLPVIENKVCNRYEFLNGRVQSTELCAGHLAGGTDSXQGDSGGPLVXFEKDKYILQGVTSWGLGXARPNKPGVYVRVSRFVTWIEGVMRNN

SEQ ID NO: 1374 - protein, 230 aa, Artificial Sequence
  Synthesized sequence with two or more selenocysteine residues substituted for two or more cysteine residues
  VARIANT (1)...(230): Xaa = selenocysteine or cysteine
VVGGXVAHPHSWPWQVSLRTRFGMHFCGGTLISPEWVLTAAHCLEKSPRPSSYKVILGAHQEVNLEPHVQEIEVSRLFLEPTRKDIALLKLSSPAVITDKVIPACLPSPNYVVADRTECFITGWGETQGTFGAGLLKEAQLPVIENKVXNRYEFLNGRVQSTELXAGHLAGGTDSXQGDSGGPLVCFEKDKYILQGVTSWGLGXARPNKPGVYVRVSRFVTWIEGVMRNN

SEQ ID NO: 1375 - protein, 230 aa, Artificial Sequence
  Synthesized sequence with two or more selenocysteine residues substituted for two or more cysteine residues
  VARIANT (1)...(230): Xaa = selenocysteine or cysteine
VVGGCVAHPHSWPWQVSLRTRFGMHFXGGTLISPEWVLTAAHXLEKSPRPSSYKVILGAHQEVNLEPHVQEIEVSRLFLEPTRKDIALLKLSSPAVITDKVIPACLPSPNYVVADRTEXFITGWGETQGTFGAGLLKEAQLPVIENKVXNRYEFLNGRVQSTELXAGHLAGGTDSCQGDSGGPLVXFEKDKYILQGVTSWGLGCARPNKPGVYVRVSRFVTWIEGVMRNN

SEQ ID NO: 1376 - protein, 230 aa, Artificial Sequence
  Synthesized sequence with two or more selenocysteine residues substituted for two or more cysteine residues
  VARIANT (1)...(230): Xaa = selenocysteine or cysteine
VVGGCVAHPHSWPWQVSLRTRFGMHFXGGTLISPEWVLTAAHXLEKSPRPSSYKVILGAHQEVNLEPHVQEIEVSRLFLEPTRKDIALLKLSSPAVITDKVIPACLPSPNYVVADRTEXFITGWGETQGTFGAGLLKEAQLPVIENKVCNRYEFLNGRVQSTELCAGHLAGGTDSXQGDSGGPLVXFEKDKYILQGVTSWGLGXARPNKPGVYVRVSRFVTWIEGVMRNN

SEQ ID NO: 1377 - protein, 230 aa, Artificial Sequence
  Synthesized sequence with two or more selenocysteine residues substituted for two or more cysteine residues
  VARIANT (1)...(230): Xaa = selenocysteine or cysteine
VVGGCVAHPHSWPWQVSLRTRFGMHFXGGTLISPEWVLTAAHXLEKSPRPSSYKVILGAHQEVNLEPHVQEIEVSRLFLEPTRKDIALLKLSSPAVITDKVIPACLPSPNYVVADRTECFITGWGETQGTFGAGLLKEAQLPVIENKVXNRYEFLNGRVQSTELXAGHLAGGTDSXQGDSGGPLVCFEKDKYILQGVTSWGLGXARPNKPGVYVRVSRFVTWIEGVMRNN

SEQ ID NO: 1378 - protein, 230 aa, Artificial Sequence
  Synthesized sequence with two or more selenocysteine residues substituted for two or more cysteine residues
  VARIANT (1)...(230): Xaa = selenocysteine or cysteine
VVGGCVAHPHSWPWQVSLRTRFGMHFCGGTLISPEWVLTAAHCLEKSPRPSSYKVILGAHQEVNLEPHVQEIEVSRLFLEPTRKDIALLKLSSPAVITDKVIPACLPSPNYVVADRTEXFITGWGETQGTFGAGLLKEAQLPVIENKVXNRYEFLNGRVQSTELXAGHLAGGTDSXQGDSGGPLVXFEKDKYILQGVTSWGLGXARPNKPGVYVRVSRFVTWIEGVMRNN

SEQ ID NO: 1379 - protein, 230 aa, Artificial Sequence
  Synthesized sequence with two or more selenocysteine residues substituted for two or more cysteine residues
  VARIANT (1)...(230): Xaa = selenocysteine or cysteine
VVGGXVAHPHSWPWQVSLRTRFGMHFXGGTLISPEWVLTAAHXLEKSPRPSSYKVILGAHQEVNLEPHVQEIEVSRLFLEPTRKDIALLKLSSPAVITDKVIPAXLPSPNYVVADRTEXFITGWGETQGTFGAGLLKEAQLPVIENKVCNRYEFLNGRVQSTELCAGHLAGGTDSCQGDSGGPLVXFEKDKYILQGVTSWGLGCARPNKPGVYVRVSRFVTWIEGVMRNN

SEQ ID NO: 1380 - protein, 230 aa, Artificial Sequence
  Synthesized sequence with two or more selenocysteine residues substituted for two or more cysteine residues
  VARIANT (1)...(230): Xaa = selenocysteine or cysteine
VVGGXVAHPHSWPWQVSLRTRFGMHFXGGTLISPEWVLTAAHXLEKSPRPSSYKVILGAHQEVNLEPHVQEIEVSRLFLEPTRKDIALLKLSSPAVITDKVIPAXLPSPNYVVADRTECFITGWGETQGTFGAGLLKEAQLPVIENKVXNRYEFLNGRVQSTELXAGHLAGGTDSCQGDSGGPLVCFEKDKYILQGVTSWGLGCARPNKPGVYVRVSRFVTWIEGVMRNN

SEQ ID NO: 1381 - protein, 230 aa, Artificial Sequence
  Synthesized sequence with two or more selenocysteine residues substituted for two or more cysteine residues
  VARIANT (1)...(230): Xaa = selenocysteine or cysteine
VVGGXVAHPHSWPWQVSLRTRFGMHFXGGTLISPEWVLTAAHXLEKSPRPSSYKVILGAHQEVNLEPHVQEIEVSRLFLEPTRKDIALLKLSSPAVITDKVIPAXLPSPNYVVADRTECFITGWGETQGTFGAGLLKEAQLPVIENKVCNRYEFLNGRVQSTELCAGHLAGGTDSXQGDSGGPLVCFEKDKYILQGVTSWGLGXARPNKPGVYVRVSRFVTWIEGVMRNN

SEQ ID NO: 1382 - protein, 230 aa, Artificial Sequence
  Synthesized sequence with two or more selenocysteine residues substituted for two or more cysteine residues
  VARIANT (1)...(230): Xaa = selenocysteine or cysteine
VVGGXVAHPHSWPWQVSLRTRFGMHFCGGTLISPEWVLTAAHCLEKSPRPSSYKVILGAHQEVNLEPHVQEIEVSRLFLEPTRKDIALLKLSSPAVITDKVIPAXLPSPNYVVADRTEXFITGWGETQGTFGAGLLKEAQLPVIENKVXNRYEFLNGRVQSTELXAGHLAGGTDSCQGDSGGPLVXFEKDKYILQGVTSWGLGCARPNKPGVYVRVSRFVTWIEGVMRNN

SEQ ID NO: 1383 - protein, 230 aa, Artificial Sequence
  Synthesized sequence with two or more selenocysteine residues substituted for two or more cysteine residues
  VARIANT (1)...(230): Xaa = selenocysteine or cysteine
VVGGXVAHPHSWPWQVSLRTRFGMHFCGGTLISPEWVLTAAHCLEKSPRPSSYKVILGAHQEVNLEPHVQEIEVSRLFLEPTRKDIALLKLSSPAVITDKVIPAXLPSPNYVVADRTEXFITGWGETQGTFGAGLLKEAQLPVIENKVCNRYEFLNGRVQSTELCAGHLAGGTDSXQGDSGGPLVXFEKDKYILQGVTSWGLGXARPNKPGVYVRVSRFVTWIEGVMRNN

SEQ ID NO: 1384 - protein, 230 aa, Artificial Sequence
  Synthesized sequence with two or more selenocysteine residues substituted for two or more cysteine residues
  VARIANT (1)...(230): Xaa = selenocysteine or cysteine
VVGGXVAHPHSWPWQVSLRTRFGMHFCGGTLISPEWVLTAAHCLEKSPRPSSYKVILGAHQEVNLEPHVQEIEVSRLFLEPTRKDIALLKLSSPAVITDKVIPAXLPSPNYVVADRTECFITGWGETQGTFGAGLLKEAQLPVIENKVXNRYEFLNGRVQSTELXAGHLAGGTDSXQGDSGGPLVCFEKDKYILQGVTSWGLGXARPNKPGVYVRVSRFVTWIEGVMRNN

SEQ ID NO: 1385 - protein, 230 aa, Artificial Sequence
  Synthesized sequence with two or more selenocysteine residues substituted for two or more cysteine residues
  VARIANT (1)...(230): Xaa = selenocysteine or cysteine
VVGGCVAHPHSWPWQVSLRTRFGMHFXGGTLISPEWVLTAAHXLEKSPRPSSYKVILGAHQEVNLEPHVQEIEVSRLFLEPTRKDIALLKLSSPAVITDKVIPAXLPSPNYVVADRTEXFITGWGETQGTFGAGLLKEAQLPVIENKVXNRYEFLNGRVQSTELXAGHLAGGTDSCQGDSGGPLVXFEKDKYILQGVTSWGLGCARPNKPGVYVRVSRFVTWIEGVMRNN

SEQ ID NO: 1386 - protein, 230 aa, Artificial Sequence
  Synthesized sequence with two or more selenocysteine residues substituted for two or more cysteine residues
  VARIANT (1)...(230): Xaa = selenocysteine or cysteine
VVGGCVAHPHSWPWQVSLRTRFGMHFXGGTLISPEWVLTAAHXLEKSPRPSSYKVILGAHQEVNLEPHVQEIEVSRLFLEPTRKDIALLKLSSPAVITDKVIPAXLPSPNYVVADRTEXFITGWGETQGTFGAGLLKEAQLPVIENKVCNRYEFLNGRVQSTELCAGHLAGGTDSXQGDSGGPLVXFEKDKYILQGVTSWGLGXARPNKPGVYVRVSRFVTWIEGVMRNN

SEQ ID NO: 1387 - protein, 230 aa, Artificial Sequence
  Synthesized sequence with two or more selenocysteine residues substituted for two or more cysteine residues
  VARIANT (1)...(230): Xaa = selenocysteine or cysteine
VVGGCVAHPHSWPWQVSLRTRFGMHFXGGTLISPEWVLTAAHXLEKSPRPSSYKVILGAHQEVNLEPHVQEIEVSRLFLEPTRKDIALLKLSSPAVITDKVIPAXLPSPNYVVADRTECFITGWGETQGTFGAGLLKEAQLPVIENKVXNRYEFLNGRVQSTELXAGHLAGGTDSXQGDSGGPLVCFEKDKYILQGVTSWGLGXARPNKPGVYVRVSRFVTWIEGVMRNN

SEQ ID NO: 1388 - protein, 230 aa, Artificial Sequence
  Synthesized sequence with two or more selenocysteine residues substituted for two or more cysteine residues
  VARIANT (1)...(230): Xaa = selenocysteine or cysteine
VVGGCVAHPHSWPWQVSLRTRFGMHFCGGTLISPEWVLTAAHCLEKSPRPSSYKVILGAHQEVNLEPHVQEIEVSRLFLEPTRKDIALLKLSSPAVITDKVIPAXLPSPNYVVADRTEXFITGWGETQGTFGAGLLKEAQLPVIENKVXNRYEFLNGRVQSTELXAGHLAGGTDSXQGDSGGPLVXFEKDKYILQGVTSWGLGXARPNKPGVYVRVSRFVTWIEGVMRNN

SEQ ID NO: 1389 - protein, 230 aa, Artificial Sequence
  Synthesized sequence with two or more selenocysteine residues substituted for two or more cysteine residues
  VARIANT (1)...(230): Xaa = selenocysteine or cysteine
VVGGXVAHPHSWPWQVSLRTRFGMHFXGGTLISPEWVLTAAHXLEKSPRPSSYKVILGAHQEVNLEPHVQEIEVSRLFLEPTRKDIALLKLSSPAVITDKVIPACLPSPNYVVADRTEXFITGWGETQGTFGAGLLKEAQLPVIENKVXNRYEFLNGRVQSTELXAGHLAGGTDSCQGDSGGPLVXFEKDKYILQGVTSWGLGCARPNKPGVYVRVSRFVTWIEGVMRNN

SEQ ID NO: 1390 - protein, 230 aa, Artificial Sequence
  Synthesized sequence with two or more selenocysteine residues substituted for two or more cysteine residues
  VARIANT (1)...(230): Xaa = selenocysteine or cysteine
VVGGXVAHPHSWPWQVSLRTRFGMHFXGGTLISPEWVLTAAHXLEKSPRPSSYKVILGAHQEVNLEPHVQEIEVSRLFLEPTRKDIALLKLSSPAVITDKVIPACLPSPNYVVADRTEXFITGWGETQGTFGAGLLKEAQLPVIENKVCNRYEFLNGRVQSTELCAGHLAGGTDSXQGDSGGPLVXFEKDKYILQGVTSWGLGXARPNKPGVYVRVSRFVTWIEGVMRNN

SEQ ID NO: 1391 - protein, 230 aa, Artificial Sequence
  Synthesized sequence with two or more selenocysteine residues substituted for two or more cysteine residues
  VARIANT (1)...(230): Xaa = selenocysteine or cysteine
VVGGXVAHPHSWPWQVSLRTRFGMHFXGGTLISPEWVLTAAHXLEKSPRPSSYKVILGAHQEVNLEPHVQEIEVSRLFLEPTRKDIALLKLSSPAVITDKVIPACLPSPNYVVADRTECFITGWGETQGTFGAGLLKEAQLPVIENKVXNRYEFLNGRVQSTELXAGHLAGGTDSXQGDSGGPLVCFEKDKYILQGVTSWGLGXARPNKPGVYVRVSRFVTWIEGVMRNN

SEQ ID NO: 1392 - protein, 230 aa, Artificial Sequence
  Synthesized sequence with two or more selenocysteine residues substituted for two or more cysteine residues
  VARIANT (1)...(230): Xaa = selenocysteine or cysteine
VVGGXVAHPHSWPWQVSLRTRFGMHFCGGTLISPEWVLTAAHCLEKSPRPSSYKVILGAHQEVNLEPHVQEIEVSRLFLEPTRKDIALLKLSSPAVITDKVIPACLPSPNYVVADRTEXFITGWGETQGTFGAGLLKEAQLPVIENKVXNRYEFLNGRVQSTELXAGHLAGGTDSXQGDSGGPLVXFEKDKYILQGVTSWGLGXARPNKPGVYVRVSRFVTWIEGVMRNN

SEQ ID NO: 1393 - protein, 230 aa, Artificial Sequence
  Synthesized sequence with two or more selenocysteine residues substituted for two or more cysteine residues
  VARIANT (1)...(230): Xaa = selenocysteine or cysteine
VVGGCVAHPHSWPWQVSLRTRFGMHFXGGTLISPEWVLTAAHXLEKSPRPSSYKVILGAHQEVNLEPHVQEIEVSRLFLEPTRKDIALLKLSSPAVITDKVIPACLPSPNYVVADRTEXFITGWGETQGTFGAGLLKEAQLPVIENKVXNRYEFLNGRVQSTELXAGHLAGGTDSXQGDSGGPLVXFEKDKYILQGVTSWGLGXARPNKPGVYVRVSRFVTWIEGVMRNN

SEQ ID NO: 1394 - protein, 230 aa, Artificial Sequence
  Synthesized sequence with two or more selenocysteine residues substituted for two or more cysteine residues
  VARIANT (1)...(230): Xaa = selenocysteine or cysteine
VVGGXVAHPHSWPWQVSLRTRFGMHFXGGTLISPEWVLTAAHXLEKSPRPSSYKVILGAHQEVNLEPHVQEIEVSRLFLEPTRKDIALLKLSSPAVITDKVIPAXLPSPNYVVADRTEXFITGWGETQGTFGAGLLKEAQLPVIENKVXNRYEFLNGRVQSTELXAGHLAGGTDSCQGDSGGPLVXFEKDKYILQGVTSWGLGCARPNKPGVYVRVSRFVTWIEGVMRNN

SEQ ID NO: 1395 - protein, 230 aa, Artificial Sequence
  Synthesized sequence with two or more selenocysteine residues substituted for two or more cysteine residues
  VARIANT (1)...(230): Xaa = selenocysteine or cysteine
VVGGXVAHPHSWPWQVSLRTRFGMHFXGGTLISPEWVLTAAHXLEKSPRPSSYKVILGAHQEVNLEPHVQEIEVSRLFLEPTRKDIALLKLSSPAVITDKVIPAXLPSPNYVVADRTEXFITGWGETQGTFGAGLLKEAQLPVIENKVCNRYEFLNGRVQSTELCAGHLAGGTDSXQGDSGGPLVXFEKDKYILQGVTSWGLGXARPNKPGVYVRVSRFVTWIEGVMRNN

SEQ ID NO: 1396 - protein, 230 aa, Artificial Sequence
  Synthesized sequence with two or more selenocysteine residues substituted for two or more cysteine residues
  VARIANT (1)...(230): Xaa = selenocysteine or cysteine
VVGGXVAHPHSWPWQVSLRTRFGMHFXGGTLISPEWVLTAAHXLEKSPRPSSYKVILGAHQEVNLEPHVQEIEVSRLFLEPTRKDIALLKLSSPAVITDKVIPAXLPSPNYVVADRTECFITGWGETQGTFGAGLLKEAQLPVIENKVXNRYEFLNGRVQSTELXAGHLAGGTDSXQGDSGGPLVCFEKDKYILQGVTSWGLGXARPNKPGVYVRVSRFVTWIEGVMRNN

SEQ ID NO: 1397 - protein, 230 aa, Artificial Sequence
  Synthesized sequence with two or more selenocysteine residues substituted for two or more cysteine residues
  VARIANT (1)...(230): Xaa = selenocysteine or cysteine
VVGGXVAHPHSWPWQVSLRTRFGMHFCGGTLISPEWVLTAAHCLEKSPRPSSYKVILGAHQEVNLEPHVQEIEVSRLFLEPTRKDIALLKLSSPAVITDKVIPAXLPSPNYVVADRTEXFITGWGETQGTFGAGLLKEAQLPVIENKVXNRYEFLNGRVQSTELXAGHLAGGTDSXQGDSGGPLVXFEKDKYILQGVTSWGLGXARPNKPGVYVRVSRFVTWIEGVMRNN

SEQ ID NO: 1398 - protein, 230 aa, Artificial Sequence
  Synthesized sequence with two or more selenocysteine residues substituted for two or more cysteine residues
  VARIANT (1)...(230): Xaa = selenocysteine or cysteine
VVGGCVAHPHSWPWQVSLRTRFGMHFXGGTLISPEWVLTAAHXLEKSPRPSSYKVILGAHQEVNLEPHVQEIEVSRLFLEPTRKDIALLKLSSPAVITDKVIPAXLPSPNYVVADRTEXFITGWGETQGTFGAGLLKEAQLPVIENKVXNRYEFLNGRVQSTELXAGHLAGGTDSXQGDSGGPLVXFEKDKYILQGVTSWGLGXARPNKPGVYVRVSRFVTWIEGVMRNN

SEQ ID NO: 1399 - protein, 230 aa, Artificial Sequence
  Synthesized sequence with two or more selenocysteine residues substituted for two or more cysteine residues
  VARIANT (1)...(230): Xaa = selenocysteine or cysteine
VVGGXVAHPHSWPWQVSLRTRFGMHFXGGTLISPEWVLTAAHXLEKSPRPSSYKVILGAHQEVNLEPHVQEIEVSRLFLEPTRKDIALLKLSSPAVITDKVIPACLPSPNYVVADRTEXFITGWGETQGTFGAGLLKEAQLPVIENKVXNRYEFLNGRVQSTELXAGHLAGGTDSXQGDSGGPLVXFEKDKYILQGVTSWGLGXARPNKPGVYVRVSRFVTWIEGVMRNN

SEQ ID NO: 1400 - protein, 230 aa, Artificial Sequence
  Synthesized sequence with two or more selenocysteine residues substituted for two or more cysteine residues
  VARIANT (1)...(230): Xaa = selenocysteine or cysteine
VVGGXVAHPHSWPWQVSLRTRFGMHFXGGTLISPEWVLTAAHXLEKSPRPSSYKVILGAHQEVNLEPHVQEIEVSRLFLEPTRKDIALLKLSSPAVITDKVIPAXLPSPNYVVADRTEXFITGWGETQGTFGAGLLKEAQLPVIENKVXNRYEFLNGRVQSTELXAGHLAGGTDSXQGDSGGPLVXFEKDKYILQGVTSWGLGXARPNKPGVYVRVSRFVTWIEGVMRNN

SEQ ID NO: 1401 - protein, 92 aa, Artificial Sequence
  Synthesized sequence with two or more selenocysteine residues substituted for two or more cysteine residues
  VARIANT (1)...(92): Xaa = selenocysteine or cysteine
APDVQDXPECTLQENPFFSQPGAPILQCMGXCFSRAYPTPLRSKKTMLVQKNVTSESTCCVAKSYNRVTVMGGFKVENHTACHCSTCYYHKS

SEQ ID NO: 1402 - protein, 92 aa, Artificial Sequence
  Synthesized sequence with two or more selenocysteine residues substituted for two or more cysteine residues
  VARIANT (1)...(92): Xaa = selenocysteine or cysteine
APDVQDCPEXTLQENPFFSQPGAPILQCMGCCFSRAYPTPLRSKKTMLVQKNVTSESTCXVAKSYNRVTVMGGFKVENHTACHCSTCYYHKS

SEQ ID NO: 1403 - protein, 92 aa, Artificial Sequence
  Synthesized sequence with two or more selenocysteine residues substituted for two or more cysteine residues
  VARIANT (1)...(92): Xaa = selenocysteine or cysteine
APDVQDCPECTLQENPFFSQPGAPILQXMGCCFSRAYPTPLRSKKTMLVQKNVTSESTCCVAKSYNRVTVMGGFKVENHTAXHCSTCYYHKS

SEQ ID NO: 1404 - protein, 92 aa, Artificial Sequence
  Synthesized sequence with two or more selenocysteine residues substituted for two or more cysteine residues
  VARIANT (1)...(92): Xaa = selenocysteine or cysteine
APDVQDCPECTLQENPFFSQPGAPILQCMGCXFSRAYPTPLRSKKTMLVQKNVTSESTCCVAKSYNRVTVMGGFKVENHTACHXSTCYYHKS

SEQ ID NO: 1405 - protein, 92 aa, Artificial Sequence
  Synthesized sequence with two or more selenocysteine residues substituted for two or more cysteine residues
  VARIANT (1)...(92): Xaa = selenocysteine or cysteine
APDVQDCPECTLQENPFFSQPGAPILQCMGCCFSRAYPTPLRSKKTMLVQKNVTSESTXCVAKSYNRVTVMGGFKVENHTACHCSTXYYHKS

SEQ ID NO: 1406 - protein, 92 aa, Artificial Sequence
  Synthesized sequence with two or more selenocysteine residues substituted for two or more cysteine residues
  VARIANT (1)...(92): Xaa = selenocysteine or cysteine
APDVQDXPEXTLQENPFFSQPGAPILQCMGXCFSRAYPTPLRSKKTMLVQKNVTSESTCXVAKSYNRVTVMGGFKVENHTACHCSTCYYHKS

SEQ ID NO: 1407 - protein, 92 aa, Artificial Sequence
  Synthesized sequence with two or more selenocysteine residues substituted for two or more cysteine residues
  VARIANT (1)...(92): Xaa = selenocysteine or cysteine
APDVQDXPECTLQENPFFSQPGAPILQXMGXCFSRAYPTPLRSKKTMLVQKNVTSESTCCVAKSYNRVTVMGGFKVENHTAXHCSTCYYHKS

SEQ ID NO: 1408 - protein, 92 aa, Artificial Sequence
  Synthesized sequence with two or more selenocysteine residues substituted for two or more cysteine residues
  VARIANT (1)...(92): Xaa = selenocysteine or cysteine
APDVQDXPECTLQENPFFSQPGAPILQCMGXXFSRAYPTPLRSKKTMLVQKNVTSESTCCVAKSYNRVTVMGGFKVENHTACHXSTCYYHKS

SEQ ID NO: 1409 - protein, 92 aa, Artificial Sequence
  Synthesized sequence with two or more selenocysteine residues substituted for two or more cysteine residues
  VARIANT (1)...(92): Xaa = selenocysteine or cysteine
APDVQDXPECTLQENPFFSQPGAPILQCMGXCFSRAYPTPLRSKKTMLVQKNVTSESTXCVAKSYNRVTVMGGFKVENHTACHCSTXYYHKS

SEQ ID NO: 1410 - protein, 92 aa, Artificial Sequence
  Synthesized sequence with two or more selenocysteine residues substituted for two or more cysteine residues
  VARIANT (1)...(92): Xaa = selenocysteine or cysteine
APDVQDCPEXTLQENPFFSQPGAPILQXMGCCFSRAYPTPLRSKKTMLVQKNVTSESTCXVAKSYNRVTVMGGFKVENHTAXHCSTCYYHKS

SEQ ID NO: 1411 - protein, 92 aa, Artificial Sequence
  Synthesized sequence with two or more selenocysteine residues substituted for two or more cysteine residues
  VARIANT (1)...(92): Xaa = selenocysteine or cysteine
APDVQDCPEXTLQENPFFSQPGAPILQCMGCXFSRAYPTPLRSKKTMLVQKNVTSESTCXVAKSYNRVTVMGGFKVENHTACHXSTCYYHKS

SEQ ID NO: 1412 - protein, 92 aa, Artificial Sequence
  Synthesized sequence with two or more selenocysteine residues substituted for two or more cysteine residues
  VARIANT (1)...(92): Xaa = selenocysteine or cysteine
APDVQDCPEXTLQENPFFSQPGAPILQCMGCCFSRAYPTPLRSKKTMLVQKNVTSESTXXVAKSYNRVTVMGGFKVENHTACHCSTXYYHKS

SEQ ID NO: 1413 - protein, 92 aa, Artificial Sequence
  Synthesized sequence with two or more selenocysteine residues substituted for two or more cysteine residues
  VARIANT (1)...(92): Xaa = selenocysteine or cysteine
APDVQDCPECTLQENPFFSQPGAPILQXMGCXFSRAYPTPLRSKKTMLVQKNVTSESTCCVAKSYNRVTVMGGFKVENHTAXHXSTCYYHKS

SEQ ID NO: 1414 - protein, 92 aa, Artificial Sequence
  Synthesized sequence with two or more selenocysteine residues substituted for two or more cysteine residues
  VARIANT (1)...(92): Xaa = selenocysteine or cysteine
APDVQDCPECTLQENPFFSQPGAPILQXMGCCFSRAYPTPLRSKKTMLVQKNVTSESTXCVAKSYNRVTVMGGFKVENHTAXHCSTXYYHKS

SEQ ID NO: 1415 - protein, 92 aa, Artificial Sequence
  Synthesized sequence with two or more selenocysteine residues substituted for two or more cysteine residues
  VARIANT (1)...(92): Xaa = selenocysteine or cysteine
APDVQDCPECTLQENPFFSQPGAPILQCMGCXFSRAYPTPLRSKKTMLVQKNVTSESTXCVAKSYNRVTVMGGFKVENHTACHXSTXYYHKS

SEQ ID NO: 1416 - protein, 92 aa, Artificial Sequence
  Synthesized sequence with two or more selenocysteine residues substituted for two or more cysteine residues
  VARIANT (1)...(92): Xaa = selenocysteine or cysteine
APDVQDXPEXTLQENPFFSQPGAPILQXMGXCFSRAYPTPLRSKKTMLVQKNVTSESTCXVAKSYNRVTVMGGFKVENHTAXHCSTCYYHKS

SEQ ID NO: 1417 - protein, 92 aa, Artificial Sequence
  Synthesized sequence with two or more selenocysteine residues substituted for two or more cysteine residues
  VARIANT (1)...(92): Xaa = selenocysteine or cysteine
APDVQDXPEXTLQENPFFSQPGAPILQCMGXXFSRAYPTPLRSKKTMLVQKNVTSESTCXVAKSYNRVTVMGGFKVENHTACHXSTCYYHKS

SEQ ID NO: 1418 - protein, 92 aa, Artificial Sequence
  Synthesized sequence with two or more selenocysteine residues substituted for two or more cysteine residues
  VARIANT (1)...(92): Xaa = selenocysteine or cysteine
APDVQDXPEXTLQENPFFSQPGAPILQCMGXCFSRAYPTPLRSKKTMLVQKNVTSESTXXVAKSYNRVTVMGGFKVENHTACHCSTXYYHKS

SEQ ID NO: 1419 - protein, 92 aa, Artificial Sequence
  Synthesized sequence with two or more selenocysteine residues substituted for two or more cysteine residues
  VARIANT (1)...(92): Xaa = selenocysteine or cysteine
APDVQDXPECTLQENPFFSQPGAPILQXMGXXFSRAYPTPLRSKKTMLVQKNVTSESTCCVAKSYNRVTVMGGFKVENHTAXHXSTCYYHKS

SEQ ID NO: 1420 - protein, 92 aa, Artificial Sequence
  Synthesized sequence with two or more selenocysteine residues substituted for two or more cysteine residues
  VARIANT (1)...(92): Xaa = selenocysteine or cysteine
APDVQDXPECTLQENPFFSQPGAPILQXMGXCFSRAYPTPLRSKKTMLVQKNVTSESTXCVAKSYNRVTVMGGFKVENHTAXHCSTXYYHKS

SEQ ID NO: 1421 - protein, 92 aa, Artificial Sequence
  Synthesized sequence with two or more selenocysteine residues substituted for two or more cysteine residues
  VARIANT (1)...(92): Xaa = selenocysteine or cysteine
APDVQDXPECTLQENPFFSQPGAPILQCMGXXFSRAYPTPLRSKKTMLVQKNVTSESTXCVAKSYNRVTVMGGFKVENHTACHXSTXYYHKS

SEQ ID NO: 1422 - protein, 92 aa, Artificial Sequence
  Synthesized sequence with two or more selenocysteine residues substituted for two or more cysteine residues
  VARIANT (1)...(92): Xaa = selenocysteine or cysteine
APDVQDCPEXTLQENPFFSQPGAPILQXMGCXFSRAYPTPLRSKKTMLVQKNVTSESTCXVAKSYNRVTVMGGFKVENHTAXHXSTCYYHKS

SEQ ID NO: 1423 - protein, 92 aa, Artificial Sequence
  Synthesized sequence with two or more selenocysteine residues substituted for two or more cysteine residues
  VARIANT (1)...(92): Xaa = selenocysteine or cysteine
APDVQDCPEXTLQENPFFSQPGAPILQXMGCCFSRAYPTPLRSKKTMLVQKNVTSESTXXVAKSYNRVTVMGGFKVENHTAXHCSTXYYHKS

SEQ ID NO: 1424 - protein, 92 aa, Artificial Sequence
  Synthesized sequence with two or more selenocysteine residues substituted for two or more cysteine residues
  VARIANT (1)...(92): Xaa = selenocysteine or cysteine
APDVQDCPECTLQENPFFSQPGAPILQXMGCXFSRAYPTPLRSKKTMLVQKNVTSESTXCVAKSYNRVTVMGGFKVENHTAXHXSTXYYHKS

SEQ ID NO: 1425 - protein, 92 aa, Artificial Sequence
  Synthesized sequence with two or more selenocysteine residues substituted for two or more cysteine residues
  VARIANT (1)...(92): Xaa = selenocysteine or cysteine
APDVQDXPEXTLQENPFFSQPGAPILQXMGXXFSRAYPTPLRSKKTMLVQKNVTSESTCXVAKSYNRVTVMGGFKVENHTAXHXSTCYYHKS

SEQ ID NO: 1426 - protein, 92 aa, Artificial Sequence
  Synthesized sequence with two or more selenocysteine residues substituted for two or more cysteine residues
  VARIANT (1)...(92): Xaa = selenocysteine or cysteine
APDVQDXPEXTLQENPFFSQPGAPILQXMGXCFSRAYPTPLRSKKTMLVQKNVTSESTXXVAKSYNRVTVMGGFKVENHTAXHCSTXYYHKS

SEQ ID NO: 1427 - protein, 92 aa, Artificial Sequence
  Synthesized sequence with two or more selenocysteine residues substituted for two or more cysteine residues
  VARIANT (1)...(92): Xaa = selenocysteine or cysteine
APDVQDXPEXTLQENPFFSQPGAPILQCMGXXFSRAYPTPLRSKKTMLVQKNVTSESTXXVAKSYNRVTVMGGFKVENHTACHXSTXYYHKS

SEQ ID NO: 1428 - protein, 92 aa, Artificial Sequence
  Synthesized sequence with two or more selenocysteine residues substituted for two or more cysteine residues
  VARIANT (1)...(92): Xaa = selenocysteine or cysteine
APDVQDXPECTLQENPFFSQPGAPILQXMGXXFSRAYPTPLRSKKTMLVQKNVTSESTXCVAKSYNRVTVMGGFKVENHTAXHXSTXYYHKS

SEQ ID NO: 1429 - protein, 92 aa, Artificial Sequence
  Synthesized sequence with two or more selenocysteine residues substituted for two or more cysteine residues
  VARIANT (1)...(92): Xaa = selenocysteine or cysteine
APDVQDCPEXTLQENPFFSQPGAPILQXMGCXFSRAYPTPLRSKKTMLVQKNVTSESTXXVAKSYNRVTVMGGFKVENHTAXHXSTXYYHKS

SEQ ID NO: 1430 - protein, 92 aa, Artificial Sequence; identical to SEQ ID NO: 1197
  Synthesized sequence with two or more selenocysteine residues substituted for two or more cysteine residues
  VARIANT (1)...(92): Xaa = selenocysteine or cysteine

SEQ ID NO: 1431 - protein, 112 aa, Artificial Sequence
  Synthesized sequence with two or more selenocysteine residues substituted for two or more cysteine residues
  VARIANT (1)...(112): Xaa = selenocysteine or cysteine
FXIPTEYTMHIERRECAYCLTINTTICAGYCMTRDINGKLFLPKYALSQDVXTYRDFIYRTVEIPGCPLHVAPYFSYPVALSCKCGKCNTDYSDCIHEAIKTNYCTKPQKSY

SEQ ID NO: 1432 - protein, 112 aa, Artificial Sequence
  Synthesized sequence with two or more selenocysteine residues substituted for two or more cysteine residues
  VARIANT (1)...(112): Xaa = selenocysteine or cysteine
FCIPTEYTMHIERREXAYCLTINTTICAGYCMTRDINGKLFLPKYALSQDVCTYRDFIYRTVEIPGXPLHVAPYFSYPVALSCKCGKCNTDYSDCIHEAIKTNYCTKPQKSY

SEQ ID NO: 1433 - protein, 112 aa, Artificial Sequence
  Synthesized sequence with two or more selenocysteine residues substituted for two or more cysteine residues
  VARIANT (1)...(112): Xaa = selenocysteine or cysteine
FCIPTEYTMHIERRECAYXLTINTTICAGYCMTRDINGKLFLPKYALSQDVCTYRDFIYRTVEIPGCPLHVAPYFSYPVALSCKCGKCNTDYSDCIHEAIKTNYXTKPQKSY

SEQ ID NO: 1434 - protein, 112 aa, Artificial Sequence
  Synthesized sequence with two or more selenocysteine residues substituted for two or more cysteine residues
  VARIANT (1)...(112): Xaa = selenocysteine or cysteine
FCIPTEYTMHIERRECAYCLTINTTIXAGYCMTRDINGKLFLPKYALSQDVCTYRDFIYRTVEIPGCPLHVAPYFSYPVALSXKCGKCNTDYSDCIHEAIKTNYCTKPQKSY

SEQ ID NO: 1435 - protein, 112 aa, Artificial Sequence
  Synthesized sequence with two or more selenocysteine residues substituted for two or more cysteine residues
  VARIANT (1)...(112): Xaa = selenocysteine or cysteine
FCIPTEYTMHIERRECAYCLTINTTICAGYXMTRDINGKLFLPKYALSQDVCTYRDFIYRTVEIPGCPLHVAPYFSYPVALSCKXGKCNTDYSDCIHEAIKTNYCTKPQKSY

SEQ ID NO: 1436 - protein, 112 aa, Artificial Sequence
  Synthesized sequence with two or more selenocysteine residues substituted for two or more cysteine residues
  VARIANT (1)...(112): Xaa = selenocysteine or cysteine
FCIPTEYTMHIERRECAYCLTINTTICAGYCMTRDINGKLFLPKYALSQDVCTYRDFIYRTVEIPGCPLHVAPYFSYPVALSCKCGKXNTDYSDXIHEAIKTNYCTKPQKSY

SEQ ID NO: 1437 - protein, 112 aa, Artificial Sequence
  Synthesized sequence with two or more selenocysteine residues substituted for two or more cysteine residues
  VARIANT (1)...(112): Xaa = selenocysteine or cysteine
FXIPTEYTMHIERREXAYCLTINTTICAGYCMTRDINGKLFLPKYALSQDVXTYRDFIYRTVEIPGXPLHVAPYFSYPVALSCKCGKCNTDYSDCIHEAIKTNYCTKPQKSY

SEQ ID NO: 1438 - protein, 112 aa, Artificial Sequence
  Synthesized sequence with two or more selenocysteine residues substituted for two or more cysteine residues
  VARIANT (1)...(112): Xaa = selenocysteine or cysteine
FXIPTEYTMHIERRECAYXLTINTTICAGYCMTRDINGKLFLPKYALSQDVXTYRDFIYRTVEIPGCPLHVAPYFSYPVALSCKCGKCNTDYSDCIHEAIKTNYXTKPQKSY

SEQ ID NO: 1439 - protein, 112 aa, Artificial Sequence
  Synthesized sequence with two or more selenocysteine residues substituted for two or more cysteine residues
  VARIANT (1)...(112): Xaa = selenocysteine or cysteine
FXIPTEYTMHIERRECAYCLTINTTIXAGYCMTRDINGKLFLPKYALSQDVXTYRDFIYRTVEIPGCPLHVAPYFSYPVALSXKCGKCNTDYSDCIHEAIKTNYCTKPQKSY

SEQ ID NO: 1440 - protein, 112 aa, Artificial Sequence
  Synthesized sequence with two or more selenocysteine residues substituted for two or more cysteine residues
  VARIANT (1)...(112): Xaa = selenocysteine or cysteine
FXIPTEYTMHIERRECAYCLTINTTICAGYXMTRDINGKLFLPKYALSQDVXTYRDFIYRTVEIPGCPLHVAPYFSYPVALSCKXGKCNTDYSDCIHEAIKTNYCTKPQKSY

SEQ ID NO: 1441 - protein, 112 aa, Artificial Sequence
  Synthesized sequence with two or more selenocysteine residues substituted for two or more cysteine residues
  VARIANT (1)...(112): Xaa = selenocysteine or cysteine
FXIPTEYTMHIERRECAYCLTINTTICAGYCMTRDINGKLFLPKYALSQDVXTYRDFIYRTVEIPGCPLHVAPYFSYPVALSCKCGKXNTDYSDXIHEAIKTNYCTKPQKSY

SEQ ID NO: 1442 - protein, 112 aa, Artificial Sequence
  Synthesized sequence with two or more selenocysteine residues substituted for two or more cysteine residues
  VARIANT (1)...(112): Xaa = selenocysteine or cysteine
FCIPTEYTMHIERREXAYXLTINTTICAGYCMTRDINGKLFLPKYALSQDVCTYRDFIYRTVEIPGXPLHVAPYFSYPVALSCKCGKCNTDYSDCIHEAIKTNYXTKPQKSY

SEQ ID NO: 1443 - protein, 112 aa, Artificial Sequence
  Synthesized sequence with two or more selenocysteine residues substituted for two or more cysteine residues
  VARIANT (1)...(112): Xaa = selenocysteine or cysteine
FCIPTEYTMHIERREXAYCLTINTTIXAGYCMTRDINGKLFLPKYALSQDVCTYRDFIYRTVEIPGXPLHVAPYFSYPVALSXKCGKCNTDYSDCIHEAIKTNYCTKPQKSY

SEQ ID NO: 1444 - protein, 112 aa, Artificial Sequence
  Synthesized sequence with two or more selenocysteine residues substituted for two or more cysteine residues
  VARIANT (1)...(112): Xaa = selenocysteine or cysteine
FCIPTEYTMHIERREXAYCLTINTTICAGYXMTRDINGKLFLPKYALSQDVCTYRDFIYRTVEIPGXPLHVAPYFSYPVALSCKXGKCNTDYSDCIHEAIKTNYCTKPQKSY

SEQ ID NO: 1445 - protein, 112 aa, Artificial Sequence
  Synthesized sequence with two or more selenocysteine residues substituted for two or more cysteine residues
  VARIANT (1)...(112): Xaa = selenocysteine or cysteine
FCIPTEYTMHIERREXAYCLTINTTICAGYCMTRDINGKLFLPKYALSQDVCTYRDFIYRTVEIPGXPLHVAPYFSYPVALSCKCGKXNTDYSDXIHEAIKTNYCTKPQKSY

SEQ ID NO: 1446 - protein, 112 aa, Artificial Sequence
  Synthesized sequence with two or more selenocysteine residues substituted for two or more cysteine residues
  VARIANT (1)...(112): Xaa = selenocysteine or cysteine
FCIPTEYTMHIERRECAYXLTINTTIXAGYCMTRDINGKLFLPKYALSQDVCTYRDFIYRTVEIPGCPLHVAPYFSYPVALSXKCGKCNTDYSDCIHEAIKTNYXTKPQKSY

SEQ ID NO: 1447 - protein, 112 aa, Artificial Sequence
  Synthesized sequence with two or more selenocysteine residues substituted for two or more cysteine residues
  VARIANT (1)...(112): Xaa = selenocysteine or cysteine
FCIPTEYTMHIERRECAYXLTINTTICAGYXMTRDINGKLFLPKYALSQDVCTYRDFIYRTVEIPGCPLHVAPYFSYPVALSCKXGKCNTDYSDCIHEAIKTNYXTKPQKSY

SEQ ID NO: 1448 - protein, 112 aa, Artificial Sequence
  Synthesized sequence with two or more selenocysteine residues substituted for two or more cysteine residues
  VARIANT (1)...(112): Xaa = selenocysteine or cysteine
FCIPTEYTMHIERRECAYXLTINTTICAGYCMTRDINGKLFLPKYALSQDVCTYRDFIYRTVEIPGCPLHVAPYFSYPVALSCKCGKXNTDYSDXIHEAIKTNYXTKPQKSY

SEQ ID NO: 1449 - protein, 112 aa, Artificial Sequence
  Synthesized sequence with two or more selenocysteine residues substituted for two or more cysteine residues
  VARIANT (1)...(112): Xaa = selenocysteine or cysteine
FCIPTEYTMHIERRECAYCLTINTTIXAGYXMTRDINGKLFLPKYALSQDVCTYRDFIYRTVEIPGCPLHVAPYFSYPVALSXKXGKCNTDYSDCIHEAIKTNYCTKPQKSY

SEQ ID NO: 1450 - protein, 112 aa, Artificial Sequence
  Synthesized sequence with two or more selenocysteine residues substituted for two or more cysteine residues
  VARIANT (1)...(112): Xaa = selenocysteine or cysteine
FCIPTEYTMHIERRECAYCLTINTTIXAGYCMTRDINGKLFLPKYALSQDVCTYRDFIYRTVEIPGCPLHVAPYFSYPVALSXKCGKXNTDYSDXIHEAIKTNYCTKPQKSY

SEQ ID NO: 1451 - protein, 112 aa, Artificial Sequence
  Synthesized sequence with two or more selenocysteine residues substituted for two or more cysteine residues
  VARIANT (1)...(112): Xaa = selenocysteine or cysteine
FCIPTEYTMHIERRECAYCLTINTTICAGYXMTRDINGKLFLPKYALSQDVCTYRDFIYRTVEIPGCPLHVAPYFSYPVALSCKXGKXNTDYSDXIHEAIKTNYCTKPQKSY

SEQ ID NO: 1452 - protein, 112 aa, Artificial Sequence
  Synthesized sequence with two or more selenocysteine residues substituted for two or more cysteine residues
  VARIANT (1)...(112): Xaa = selenocysteine or cysteine
FXIPTEYTMHIERREXAYXLTINTTICAGYCMTRDINGKLFLPKYALSQDVXTYRDFIYRTVEIPGXPLHVAPYFSYPVALSCKCGKCNTDYSDCIHEAIKTNYXTKPQKSY

SEQ ID NO: 1453 - protein, 112 aa, Artificial Sequence
  Synthesized sequence with two or more selenocysteine residues substituted for two or more cysteine residues
  VARIANT (1)...(112): Xaa = selenocysteine or cysteine
FXIPTEYTMHIERREXAYCLTINTTIXAGYCMTRDINGKLFLPKYALSQDVXTYRDFIYRTVEIPGXPLHVAPYFSYPVALSXKCGKCNTDYSDCIHEAIKTNYCTKPQKSY

SEQ ID NO: 1454 - protein, 112 aa, Artificial Sequence
  Synthesized sequence with two or more selenocysteine residues substituted for two or more cysteine residues
  VARIANT (1)...(112): Xaa = selenocysteine or cysteine
FXIPTEYTMHIERREXAYCLTINTTICAGYXMTRDINGKLFLPKYALSQDVXTYRDFIYRTVEIPGXPLHVAPYFSYPVALSCKXGKCNTDYSDCIHEAIKTNYCTKPQKSY

SEQ ID NO: 1455 - protein, 112 aa, Artificial Sequence
  Synthesized sequence with two or more selenocysteine residues substituted for two or more cysteine residues
  VARIANT (1)...(112): Xaa = selenocysteine or cysteine
FXIPTEYTMHIERREXAYCLTINTTICAGYCMTRDINGKLFLPKYALSQDVXTYRDFIYRTVEIPGXPLHVAPYFSYPVALSCKCGKXNTDYSDXIHEAIKTNYCTKPQKSY

SEQ ID NO: 1456 - protein, 112 aa, Artificial Sequence
  Synthesized sequence with two or more selenocysteine residues substituted for two or more cysteine residues
  VARIANT (1)...(112): Xaa = selenocysteine or cysteine
FXIPTEYTMHIERRECAYXLTINTTIXAGYCMTRDINGKLFLPKYALSQDVXTYRDFIYRTVEIPGCPLHVAPYFSYPVALSXKCGKCNTDYSDCIHEAIKTNYXTKPQKSY

SEQ ID NO: 1457 - protein, 112 aa, Artificial Sequence
  Synthesized sequence with two or more selenocysteine residues substituted for two or more cysteine residues
  VARIANT (1)...(112): Xaa = selenocysteine or cysteine
FXIPTEYTMHIERRECAYXLTINTTICAGYXMTRDINGKLFLPKYALSQDVXTYRDFIYRTVEIPGCPLHVAPYFSYPVALSCKXGKCNTDYSDCIHEAIKTNYXTKPQKSY

SEQ ID NO: 1458 - protein, 112 aa, Artificial Sequence
  Synthesized sequence with two or more selenocysteine residues substituted for two or more cysteine residues
  VARIANT (1)...(112): Xaa = selenocysteine or cysteine
FXIPTEYTMHIERRECAYXLTINTTICAGYCMTRDINGKLFLPKYALSQDVXTYRDFIYRTVEIPGCPLHVAPYFSYPVALSCKCGKXNTDYSDXIHEAIKTNYXTKPQKSY

SEQ ID NO: 1459 - protein, 112 aa, Artificial Sequence
  Synthesized sequence with two or more selenocysteine residues substituted for two or more cysteine residues
  VARIANT (1)...(112): Xaa = selenocysteine or cysteine
FXIPTEYTMHIERRECAYCLTINTTIXAGYXMTRDINGKLFLPKYALSQDVXTYRDFIYRTVEIPGCPLHVAPYFSYPVALSXKXGKCNTDYSDCIHEAIKTNYCTKPQKSY

SEQ ID NO: 1460 - protein, 112 aa, Artificial Sequence
  Synthesized sequence with two or more selenocysteine residues substituted for two or more cysteine residues
  VARIANT (1)...(112): Xaa = selenocysteine or cysteine
FXIPTEYTMHIERRECAYCLTINTTIXAGYCMTRDINGKLFLPKYALSQDVXTYRDFIYRTVEIPGCPLHVAPYFSYPVALSXKCGKXNTDYSDXIHEAIKTNYCTKPQKSY

SEQ ID NO: 1461 - protein, 112 aa, Artificial Sequence
  Synthesized sequence with two or more selenocysteine residues substituted for two or more cysteine residues
  VARIANT (1)...(112): Xaa = selenocysteine or cysteine
FXIPTEYTMHIERRECAYCLTINTTICAGYXMTRDINGKLFLPKYALSQDVXTYRDFIYRTVEIPGCPLHVAPYFSYPVALSCKXGKXNTDYSDXIHEAIKTNYCTKPQKSY

SEQ ID NO: 1462 - protein, 112 aa, Artificial Sequence
  Synthesized sequence with two or more selenocysteine residues substituted for two or more cysteine residues
  VARIANT (1)...(112): Xaa = selenocysteine or cysteine
FCIPTEYTMHIERREXAYXLTINTTIXAGYCMTRDINGKLFLPKYALSQDVCTYRDFIYRTVEIPGXPLHVAPYFSYPVALSXKCGKCNTDYSDCIHEAIKTNYXTKPQKSY

SEQ ID NO: 1463 - protein, 112 aa, Artificial Sequence
  Synthesized sequence with two or more selenocysteine residues substituted for two or more cysteine residues
  VARIANT (1)...(112): Xaa = selenocysteine or cysteine
FCIPTEYTMHIERREXAYXLTINTTICAGYXMTRDINGKLFLPKYALSQDVCTYRDFIYRTVEIPGXPLHVAPYFSYPVALSCKXGKCNTDYSDCIHEAIKTNYXTKPQKSY

SEQ ID NO: 1464 - protein, 112 aa, Artificial Sequence
  Synthesized sequence with two or more selenocysteine residues substituted for two or more cysteine residues
  VARIANT (1)...(112): Xaa = selenocysteine or cysteine
FCIPTEYTMHIERREXAYXLTINTTICAGYCMTRDINGKLFLPKYALSQDVCTYRDFIYRTVEIPGXPLHVAPYFSYPVALSCKCGKXNTDYSDXIHEAIKTNYXTKPQKSY

SEQ ID NO: 1465 - protein, 112 aa, Artificial Sequence
  Synthesized sequence with two or more selenocysteine residues substituted for two or more cysteine residues
  VARIANT (1)...(112): Xaa = selenocysteine or cysteine
FCIPTEYTMHIERREXAYCLTINTTIXAGYXMTRDINGKLFLPKYALSQDVCTYRDFIYRTVEIPGXPLHVAPYFSYPVALSXKXGKCNTDYSDCIHEAIKTNYCTKPQKSY

SEQ ID NO: 1466 - protein, 112 aa, Artificial Sequence
  Synthesized sequence with two or more selenocysteine residues substituted for two or more cysteine residues
  VARIANT (1)...(112): Xaa = selenocysteine or cysteine
FCIPTEYTMHIERREXAYCLTINTTIXAGYCMTRDINGKLFLPKYALSQDVCTYRDFIYRTVEIPGXPLHVAPYFSYPVALSXKCGKXNTDYSDXIHEAIKTNYCTKPQKSY

SEQ ID NO: 1467 - protein, 112 aa, Artificial Sequence
  Synthesized sequence with two or more selenocysteine residues substituted for two or more cysteine residues
  VARIANT (1)...(112): Xaa = selenocysteine or cysteine
FCIPTEYTMHIERREXAYCLTINTTICAGYXMTRDINGKLFLPKYALSQDVCTYRDFIYRTVEIPGXPLHVAPYFSYPVALSCKXGKXNTDYSDXIHEAIKTNYCTKPQKSY

SEQ ID NO: 1468 - protein, 112 aa, Artificial Sequence
  Synthesized sequence with two or more selenocysteine residues substituted for two or more cysteine residues
  VARIANT (1)...(112): Xaa = selenocysteine or cysteine
FCIPTEYTMHIERRECAYXLTINTTIXAGYXMTRDINGKLFLPKYALSQDVCTYRDFIYRTVEIPGCPLHVAPYFSYPVALSXKXGKCNTDYSDCIHEAIKTNYXTKPQKSY

SEQ ID NO: 1469 - protein, 112 aa, Artificial Sequence
  Synthesized sequence with two or more selenocysteine residues substituted for two or more cysteine residues
  VARIANT (1)...(112): Xaa = selenocysteine or cysteine
FCIPTEYTMHIERRECAYXLTINTTIXAGYCMTRDINGKLFLPKYALSQDVCTYRDFIYRTVEIPGCPLHVAPYFSYPVALSXKCGKXNTDYSDXIHEAIKTNYXTKPQKSY

SEQ ID NO: 1470 - protein, 112 aa, Artificial Sequence
  Synthesized sequence with two or more selenocysteine residues substituted for two or more cysteine residues
  VARIANT (1)...(112): Xaa = selenocysteine or cysteine
FCIPTEYTMHIERRECAYXLTINTTICAGYXMTRDINGKLFLPKYALSQDVCTYRDFIYRTVEIPGCPLHVAPYFSYPVALSCKXGKXNTDYSDXIHEAIKTNYXTKPQKSY

SEQ ID NO: 1471 - protein, 112 aa, Artificial Sequence
  Synthesized sequence with two or more selenocysteine residues substituted for two or more cysteine residues
  VARIANT (1)...(112): Xaa = selenocysteine or cysteine
FCIPTEYTMHIERRECAYCLTINTTIXAGYXMTRDINGKLFLPKYALSQDVCTYRDFIYRTVEIPGCPLHVAPYFSYPVALSXKXGKXNTDYSDXIHEAIKTNYCTKPQKSY

SEQ ID NO: 1472 - protein, 112 aa, Artificial Sequence
  Synthesized sequence with two or more selenocysteine residues substituted for two or more cysteine residues
  VARIANT (1)...(112): Xaa = selenocysteine or cysteine
FXIPTEYTMHIERREXAYXLTINTTIXAGYCMTRDINGKLFLPKYALSQDVXTYRDFIYRTVEIPGXPLHVAPYFSYPVALSXKCGKCNTDYSDCIHEAIKTNYXTKPQKSY

SEQ ID NO: 1473 - protein, 112 aa, Artificial Sequence
  Synthesized sequence with two or more selenocysteine residues substituted for two or more cysteine residues
  VARIANT (1)...(112): Xaa = selenocysteine or cysteine
FXIPTEYTMHIERREXAYXLTINTTICAGYXMTRDINGKLFLPKYALSQDVXTYRDFIYRTVEIPGXPLHVAPYFSYPVALSCKXGKCNTDYSDCIHEAIKTNYXTKPQKSY

SEQ ID NO: 1474 - protein, 112 aa, Artificial Sequence
  Synthesized sequence with two or more selenocysteine residues substituted for two or more cysteine residues
  VARIANT (1)...(112): Xaa = selenocysteine or cysteine
FXIPTEYTMHIERREXAYXLTINTTICAGYCMTRDINGKLFLPKYALSQDVXTYRDFIYRTVEIPGXPLHVAPYFSYPVALSCKCGKXNTDYSDXIHEAIKTNYXTKPQKSY

SEQ ID NO: 1475 - protein, 112 aa, Artificial Sequence
  Synthesized sequence with two or more selenocysteine residues substituted for two or more cysteine residues
  VARIANT (1)...(112): Xaa = selenocysteine or cysteine
FXIPTEYTMHIERREXAYCLTINTTIXAGYXMTRDINGKLFLPKYALSQDVXTYRDFIYRTVEIPGXPLHVAPYFSYPVALSXKXGKCNTDYSDCIHEAIKTNYCTKPQKSY

SEQ ID NO: 1476 - protein, 112 aa, Artificial Sequence
  Synthesized sequence with two or more selenocysteine residues substituted for two or more cysteine residues
  VARIANT (1)...(112): Xaa = selenocysteine or cysteine
FXIPTEYTMHIERREXAYCLTINTTIXAGYCMTRDINGKLFLPKYALSQDVXTYRDFIYRTVEIPGXPLHVAPYFSYPVALSXKCGKXNTDYSDXIHEAIKTNYCTKPQKSY

SEQ ID NO: 1477 - protein, 112 aa, Artificial Sequence
  Synthesized sequence with two or more selenocysteine residues substituted for two or more cysteine residues
  VARIANT (1)...(112): Xaa = selenocysteine or cysteine
FXIPTEYTMHIERREXAYCLTINTTICAGYXMTRDINGKLFLPKYALSQDVXTYRDFIYRTVEIPGXPLHVAPYFSYPVALSCKXGKXNTDYSDXIHEAIKTNYCTKPQKSY

SEQ ID NO: 1478 - protein, 112 aa, Artificial Sequence
  Synthesized sequence with two or more selenocysteine residues substituted for two or more cysteine residues
  VARIANT (1)...(112): Xaa = selenocysteine or cysteine
FXIPTEYTMHIERRECAYXLTINTTIXAGYXMTRDINGKLFLPKYALSQDVXTYRDFIYRTVEIPGCPLHVAPYFSYPVALSXKXGKCNTDYSDCIHEAIKTNYXTKPQKSY

SEQ ID NO: 1479 - protein, 112 aa, Artificial Sequence
  Synthesized sequence with two or more selenocysteine residues substituted for two or more cysteine residues
  VARIANT (1)...(112): Xaa = selenocysteine or cysteine
FXIPTEYTMHIERRECAYXLTINTTIXAGYCMTRDINGKLFLPKYALSQDVXTYRDFIYRTVEIPGCPLHVAPYFSYPVALSXKCGKXNTDYSDXIHEAIKTNYXTKPQKSY

SEQ ID NO: 1480 - protein, 112 aa, Artificial Sequence
  Synthesized sequence with two or more selenocysteine residues substituted for two or more cysteine residues
  VARIANT (1)...(112): Xaa = selenocysteine or cysteine
FXIPTEYTMHIERRECAYXLTINTTICAGYXMTRDINGKLFLPKYALSQDVXTYRDFIYRTVEIPGCPLHVAPYFSYPVALSCKXGKXNTDYSDXIHEAIKTNYXTKPQKSY

SEQ ID NO: 1481 - protein, 112 aa, Artificial Sequence
  Synthesized sequence with two or more selenocysteine residues substituted for two or more cysteine residues
  VARIANT (1)...(112): Xaa = selenocysteine or cysteine
FXIPTEYTMHIERRECAYCLTINTTIXAGYXMTRDINGKLFLPKYALSQDVXTYRDFIYRTVEIPGCPLHVAPYFSYPVALSXKXGKXNTDYSDXIHEAIKTNYCTKPQKSY

SEQ ID NO: 1482 - protein, 112 aa, Artificial Sequence
  Synthesized sequence with two or more selenocysteine residues substituted for two or more cysteine residues
  VARIANT (1)...(112): Xaa = selenocysteine or cysteine
FCIPTEYTMHIERREXAYXLTINTTIXAGYXMTRDINGKLFLPKYALSQDVCTYRDFIYRTVEIPGXPLHVAPYFSYPVALSXKXGKCNTDYSDCIHEAIKTNYXTKPQKSY

SEQ ID NO: 1483 - protein, 112 aa, Artificial Sequence
  Synthesized sequence with two or more selenocysteine residues substituted for two or more cysteine residues
  VARIANT (1)...(112): Xaa = selenocysteine or cysteine
FCIPTEYTMHIERREXAYXLTINTTIXAGYCMTRDINGKLFLPKYALSQDVCTYRDFIYRTVEIPGXPLHVAPYFSYPVALSXKCGKXNTDYSDXIHEAIKTNYXTKPQKSY

SEQ ID NO: 1484 - protein, 112 aa, Artificial Sequence
  Synthesized sequence with two or more selenocysteine residues substituted for two or more cysteine residues
  VARIANT (1)...(112): Xaa = selenocysteine or cysteine
FCIPTEYTMHIERREXAYXLTINTTICAGYXMTRDINGKLFLPKYALSQDVCTYRDFIYRTVEIPGXPLHVAPYFSYPVALSCKXGKXNTDYSDXIHEAIKTNYXTKPQKSY

SEQ ID NO: 1485 - protein, 112 aa, Artificial Sequence
  Synthesized sequence with two or more selenocysteine residues substituted for two or more cysteine residues
  VARIANT (1)...(112): Xaa = selenocysteine or cysteine
FCIPTEYTMHIERREXAYCLTINTTIXAGYXMTRDINGKLFLPKYALSQDVCTYRDFIYRTVEIPGXPLHVAPYFSYPVALSXKXGKXNTDYSDXIHEAIKTNYCTKPQKSY

SEQ ID NO: 1486 - protein, 112 aa, Artificial Sequence
  Synthesized sequence with two or more selenocysteine residues substituted for two or more cysteine residues
  VARIANT (1)...(112): Xaa = selenocysteine or cysteine
FCIPTEYTMHIERRECAYXLTINTTIXAGYXMTRDINGKLFLPKYALSQDVCTYRDFIYRTVEIPGCPLHVAPYFSYPVALSXKXGKXNTDYSDXIHEAIKTNYXTKPQKSY

SEQ ID NO: 1487 - protein, 112 aa, Artificial Sequence
  Synthesized sequence with two or more selenocysteine residues substituted for two or more cysteine residues
  VARIANT (1)...(112): Xaa = selenocysteine or cysteine
FXIPTEYTMHIERREXAYXLTINTTIXAGYXMTRDINGKLFLPKYALSQDVXTYRDFIYRTVEIPGXPLHVAPYFSYPVALSXKXGKCNTDYSDCIHEAIKTNYXTKPQKSY

SEQ ID NO: 1488 - protein, 112 aa, Artificial Sequence
  Synthesized sequence with two or more selenocysteine residues substituted for two or more cysteine residues
  VARIANT (1)...(112): Xaa = selenocysteine or cysteine
FXIPTEYTMHIERREXAYXLTINTTIXAGYCMTRDINGKLFLPKYALSQDVXTYRDFIYRTVEIPGXPLHVAPYFSYPVALSXKCGKXNTDYSDXIHEAIKTNYXTKPQKSY

SEQ ID NO: 1489 - protein, 112 aa, Artificial Sequence
  Synthesized sequence with two or more selenocysteine residues substituted for two or more cysteine residues
  VARIANT (1)...(112): Xaa = selenocysteine or cysteine
FXIPTEYTMHIERREXAYXLTINTTICAGYXMTRDINGKLFLPKYALSQDVXTYRDFIYRTVEIPGXPLHVAPYFSYPVALSCKXGKXNTDYSDXIHEAIKTNYXTKPQKSY

SEQ ID NO: 1490 - protein, 112 aa, Artificial Sequence
  Synthesized sequence with two or more selenocysteine residues substituted for two or more cysteine residues
  VARIANT (1)...(112): Xaa = selenocysteine or cysteine
FXIPTEYTMHIERREXAYCLTINTTIXAGYXMTRDINGKLFLPKYALSQDVXTYRDFIYRTVEIPGXPLHVAPYFSYPVALSXKXGKXNTDYSDXIHEAIKTNYCTKPQKSY

SEQ ID NO: 1491 - protein, 112 aa, Artificial Sequence
  Synthesized sequence with two or more selenocysteine residues substituted for two or more cysteine residues
  VARIANT (1)...(112): Xaa = selenocysteine or cysteine
FXIPTEYTMHIERRECAYXLTINTTIXAGYXMTRDINGKLFLPKYALSQDVXTYRDFIYRTVEIPGCPLHVAPYFSYPVALSXKXGKXNTDYSDXIHEAIKTNYXTKPQKSY

SEQ ID NO: 1492 - protein, 112 aa, Artificial Sequence
  Synthesized sequence with two or more selenocysteine residues substituted for two or more cysteine residues
  VARIANT (1)...(112): Xaa = selenocysteine or cysteine
FCIPTEYTMHIERREXAYXLTINTTIXAGYXMTRDINGKLFLPKYALSQDVCTYRDFIYRTVEIPGXPLHVAPYFSYPVALSXKXGKXNTDYSDXIHEAIKTNYXTKPQKSY

SEQ ID NO: 1493 - protein, 112 aa, Artificial Sequence
  Synthesized sequence with two or more selenocysteine residues substituted for two or more cysteine residues
  VARIANT (1)...(112): Xaa = selenocysteine or cysteine
FXIPTEYTMHIERREXAYXLTINTTIXAGYXMTRDINGKLFLPKYALSQDVXTYRDFIYRTVEIPGXPLHVAPYFSYPVALSXKXGKXNTDYSDXIHEAIKTNYXTKPQKSY

SEQ ID NO: 1494 - protein, 111 aa, Artificial Sequence
  Synthesized sequence with two or more selenocysteine residues substituted for two or more cysteine residues
  VARIANT (1)...(111): Xaa = selenocysteine or cysteine
NSXELTNITIAIEKEECRFCISINTTWCAGYCYTRDLVYKDPARPKIQKTXTFKELVYETVRVPGCAHHADSLYTYPVATQCHCGKCDSDSTDCTVRGLGPSYCSFGEMKE

SEQ ID NO: 1495 - protein, 111 aa, Artificial Sequence
  Synthesized sequence with two or more selenocysteine residues substituted for two or more cysteine residues
  VARIANT (1)...(111): Xaa = selenocysteine or cysteine
NSCELTNITIAIEKEEXRFCISINTTWCAGYCYTRDLVYKDPARPKIQKTCTFKELVYETVRVPGXAHHADSLYTYPVATQCHCGKCDSDSTDCTVRGLGPSYCSFGEMKE

SEQ ID NO: 1496 - protein, 111 aa, Artificial Sequence
  Synthesized sequence with two or more selenocysteine residues substituted for two or more cysteine residues
  VARIANT (1)...(111): Xaa = selenocysteine or cysteine
NSCELTNITIAIEKEECRFXISINTTWCAGYCYTRDLVYKDPARPKIQKTCTFKELVYETVRVPGCAHHADSLYTYPVATQCHCGKCDSDSTDCTVRGLGPSYXSFGEMKE

SEQ ID NO: 1497 - protein, 111 aa, Artificial Sequence
  Synthesized sequence with two or more selenocysteine residues substituted for two or more cysteine residues
  VARIANT (1)...(111): Xaa = selenocysteine or cysteine
NSCELTNITIAIEKEECRFCISINTTWXAGYCYTRDLVYKDPARPKIQKTCTFKELVYETVRVPGCAHHADSLYTYPVATQXHCGKCDSDSTDCTVRGLGPSYCSFGEMKE

SEQ ID NO: 1498 - protein, 111 aa, Artificial Sequence
  Synthesized sequence with two or more selenocysteine residues substituted for two or more cysteine residues
  VARIANT (1)...(111): Xaa = selenocysteine or cysteine
NSCELTNITIAIEKEECRFCISINTTWCAGYXYTRDLVYKDPARPKIQKTCTFKELVYETVRVPGCAHHADSLYTYPVATQCHXGKCDSDSTDCTVRGLGPSYCSFGEMKE

SEQ ID NO: 1499 - protein, 111 aa, Artificial Sequence
  Synthesized sequence with two or more selenocysteine residues substituted for two or more cysteine residues
  VARIANT (1)...(111): Xaa = selenocysteine or cysteine
NSCELTNITIAIEKEECRFCISINTTWCAGYCYTRDLVYKDPARPKIQKTCTFKELVYETVRVPGCAHHADSLYTYPVATQCHCGKXDSDSTDXTVRGLGPSYCSFGEMKE

SEQ ID NO: 1500 - protein, 111 aa, Artificial Sequence
  Synthesized sequence with two or more selenocysteine residues substituted for two or more cysteine residues
  VARIANT (1)...(111): Xaa = selenocysteine or cysteine
NSXELTNITIAIEKEEXRFCISINTTWCAGYCYTRDLVYKDPARPKIQKTXTFKELVYETVRVPGXAHHADSLYTYPVATQCHCGKCDSDSTDCTVRGLGPSYCSFGEMKE

SEQ ID NO: 1501 - protein, 111 aa, Artificial Sequence
  Synthesized sequence with two or more selenocysteine residues substituted for two or more cysteine residues
  VARIANT (1)...(111): Xaa = selenocysteine or cysteine
NSXELTNITIAIEKEECRFXISINTTWCAGYCYTRDLVYKDPARPKIQKTXTFKELVYETVRVPGCAHHADSLYTYPVATQCHCGKCDSDSTDCTVRGLGPSYXSFGEMKE

SEQ ID NO: 1502 - protein, 111 aa, Artificial Sequence
  Synthesized sequence with two or more selenocysteine residues substituted for two or more cysteine residues
  VARIANT (1)...(111): Xaa = selenocysteine or cysteine
NSXELTNITIAIEKEECRFCISINTTWXAGYCYTRDLVYKDPARPKIQKTXTFKELVYETVRVPGCAHHADSLYTYPVATQXHCGKCDSDSTDCTVRGLGPSYCSFGEMKE

SEQ ID NO: 1503 - protein, 111 aa, Artificial Sequence
  Synthesized sequence with two or more selenocysteine residues substituted for two or more cysteine residues
  VARIANT (1)...(111): Xaa = selenocysteine or cysteine
NSXELTNITIAIEKEECRFCISINTTWCAGYXYTRDLVYKDPARPKIQKTXTFKELVYETVRVPGCAHHADSLYTYPVATQCHXGKCDSDSTDCTVRGLGPSYCSFGEMKE

SEQ ID NO: 1504 - protein, 111 aa, Artificial Sequence
  Synthesized sequence with two or more selenocysteine residues substituted for two or more cysteine residues
  VARIANT (1)...(111): Xaa = selenocysteine or cysteine
NSXELTNITIAIEKEECRFCISINTTWCAGYCYTRDLVYKDPARPKIQKTXTFKELVYETVRVPGCAHHADSLYTYPVATQCHCGKXDSDSTDXTVRGLGPSYCSFGEMKE

SEQ ID NO: 1505 - protein, 111 aa, Artificial Sequence
  Synthesized sequence with two or more selenocysteine residues substituted for two or more cysteine residues
  VARIANT (1)...(111): Xaa = selenocysteine or cysteine
NSCELTNITIAIEKEEXRFXISINTTWCAGYCYTRDLVYKDPARPKIQKTCTFKELVYETVRVPGXAHHADSLYTYPVATQCHCGKCDSDSTDCTVRGLGPSYXSFGEMKE

SEQ ID NO: 1506 - protein, 111 aa, Artificial Sequence
  Synthesized sequence with two or more selenocysteine residues substituted for two or more cysteine residues
  VARIANT (1)...(111): Xaa = selenocysteine or cysteine
NSCELTNITIAIEKEEXRFCISINTTWXAGYCYTRDLVYKDPARPKIQKTCTFKELVYETVRVPGXAHHADSLYTYPVATQXHCGKCDSDSTDCTVRGLGPSYCSFGEMKE

SEQ ID NO: 1507 - protein, 111 aa, Artificial Sequence
  Synthesized sequence with two or more selenocysteine residues substituted for two or more cysteine residues
  VARIANT (1)...(111): Xaa = selenocysteine or cysteine
NSCELTNITIAIEKEEXRFCISINTTWCAGYXYTRDLVYKDPARPKIQKTCTFKELVYETVRVPGXAHHADSLYTYPVATQCHXGKCDSDSTDCTVRGLGPSYCSFGEMKE

SEQ ID NO: 1508 - protein, 111 aa, Artificial Sequence
  Synthesized sequence with two or more selenocysteine residues substituted for two or more cysteine residues
  VARIANT (1)...(111): Xaa = selenocysteine or cysteine
NSCELTNITIAIEKEEXRFCISINTTWCAGYCYTRDLVYKDPARPKIQKTCTFKELVYETVRVPGXAHHADSLYTYPVATQCHCGKXDSDSTDXTVRGLGPSYCSFGEMKE

SEQ ID NO: 1509 - protein, 111 aa, Artificial Sequence
  Synthesized sequence with two or more selenocysteine residues substituted for two or more cysteine residues
  VARIANT (1)...(111): Xaa = selenocysteine or cysteine
NSCELTNITIAIEKEECRFXISINTTWXAGYCYTRDLVYKDPARPKIQKTCTFKELVYETVRVPGCAHHADSLYTYPVATQXHCGKCDSDSTDCTVRGLGPSYXSFGEMKE

SEQ ID NO: 1510 - protein, 111 aa, Artificial Sequence
  Synthesized sequence with two or more selenocysteine residues substituted for two or more cysteine residues
  VARIANT (1)...(111): Xaa = selenocysteine or cysteine
NSCELTNITIAIEKEECRFXISINTTWCAGYXYTRDLVYKDPARPKIQKTCTFKELVYETVRVPGCAHHADSLYTYPVATQCHXGKCDSDSTDCTVRGLGPSYXSFGEMKE

SEQ ID NO: 1511 - protein, 111 aa, Artificial Sequence
  Synthesized sequence with two or more selenocysteine residues substituted for two or more cysteine residues
  VARIANT (1)...(111): Xaa = selenocysteine or cysteine
NSCELTNITIAIEKEECRFXISINTTWCAGYCYTRDLVYKDPARPKIQKTCTFKELVYETVRVPGCAHHADSLYTYPVATQCHCGKXDSDSTDXTVRGLGPSYXSFGEMKE

SEQ ID NO: 1512 - protein, 111 aa, Artificial Sequence
  Synthesized sequence with two or more selenocysteine residues substituted for two or more cysteine residues
  VARIANT (1)...(111): Xaa = selenocysteine or cysteine
NSCELTNITIAIEKEECRFCISINTTWXAGYXYTRDLVYKDPARPKIQKTCTFKELVYETVRVPGCAHHADSLYTYPVATQXHXGKCDSDSTDCTVRGLGPSYCSFGEMKE

SEQ ID NO: 1513 - protein, 111 aa, Artificial Sequence
  Synthesized sequence with two or more selenocysteine residues substituted for two or more cysteine residues
  VARIANT (1)...(111): Xaa = selenocysteine or cysteine
NSCELTNITIAIEKEECRFCISINTTWXAGYCYTRDLVYKDPARPKIQKTCTFKELVYETVRVPGCAHHADSLYTYPVATQXHCGKXDSDSTDXTVRGLGPSYCSFGEMKE

SEQ ID NO: 1514 - protein, 111 aa, Artificial Sequence
  Synthesized sequence with two or more selenocysteine residues substituted for two or more cysteine residues
  VARIANT (1)...(111): Xaa = selenocysteine or cysteine
NSCELTNITIAIEKEECRFCISINTTWCAGYXYTRDLVYKDPARPKIQKTCTFKELVYETVRVPGCAHHADSLYTYPVATQCHXGKXDSDSTDXTVRGLGPSYCSFGEMKE

SEQ ID NO: 1515 - protein, 111 aa, Artificial Sequence
  Synthesized sequence with two or more selenocysteine residues substituted for two or more cysteine residues
  VARIANT (1)...(111): Xaa = selenocysteine or cysteine
NSXELTNITIAIEKEEXRFXISINTTWCAGYCYTRDLVYKDPARPKIQKTXTFKELVYETVRVPGXAHHADSLYTYPVATQCHCGKCDSDSTDCTVRGLGPSYXSFGEMKE

SEQ ID NO: 1516 - protein, 111 aa, Artificial Sequence
  Synthesized sequence with two or more selenocysteine residues substituted for two or more cysteine residues
  VARIANT (1)...(111): Xaa = selenocysteine or cysteine
NSXELTNITIAIEKEEXRFCISINTTWXAGYCYTRDLVYKDPARPKIQKTXTFKELVYETVRVPGXAHHADSLYTYPVATQXHCGKCDSDSTDCTVRGLGPSYCSFGEMKE

SEQ ID NO: 1517 - protein, 111 aa, Artificial Sequence
  Synthesized sequence with two or more selenocysteine residues substituted for two or more cysteine residues
  VARIANT (1)...(111): Xaa = selenocysteine or cysteine
NSXELTNITIAIEKEEXRFCISINTTWCAGYXYTRDLVYKDPARPKIQKTXTFKELVYETVRVPGXAHHADSLYTYPVATQCHXGKCDSDSTDCTVRGLGPSYCSFGEMKE

SEQ ID NO: 1518 - protein, 111 aa, Artificial Sequence
  Synthesized sequence with two or more selenocysteine residues substituted for two or more cysteine residues
  VARIANT (1)...(111): Xaa = selenocysteine or cysteine
NSXELTNITIAIEKEEXRFCISINTTWCAGYCYTRDLVYKDPARPKIQKTXTFKELVYETVRVPGXAHHADSLYTYPVATQCHCGKXDSDSTDXTVRGLGPSYCSFGEMKE

SEQ ID NO: 1519 - protein, 111 aa, Artificial Sequence
  Synthesized sequence with two or more selenocysteine residues substituted for two or more cysteine residues
  VARIANT (1)...(111): Xaa = selenocysteine or cysteine
NSXELTNITIAIEKEECRFXISINTTWXAGYCYTRDLVYKDPARPKIQKTXTFKELVYETVRVPGCAHHADSLYTYPVATQXHCGKCDSDSTDCTVRGLGPSYXSFGEMKE

SEQ ID NO: 1520 - protein, 111 aa, Artificial Sequence
  Synthesized sequence with two or more selenocysteine residues substituted for two or more cysteine residues
  VARIANT (1)...(111): Xaa = selenocysteine or cysteine
NSXELTNITIAIEKEECRFXISINTTWCAGYXYTRDLVYKDPARPKIQKTXTFKELVYETVRVPGCAHHADSLYTYPVATQCHXGKCDSDSTDCTVRGLGPSYXSFGEMKE

SEQ ID NO: 1521 - protein, 111 aa, Artificial Sequence
  Synthesized sequence with two or more selenocysteine residues substituted for two or more cysteine residues
  VARIANT (1)...(111): Xaa = selenocysteine or cysteine
NSXELTNITIAIEKEECRFXISINTTWCAGYCYTRDLVYKDPARPKIQKTXTFKELVYETVRVPGCAHHADSLYTYPVATQCHCGKXDSDSTDXTVRGLGPSYXSFGEMKE

SEQ ID NO: 1522 - protein, 111 aa, Artificial Sequence
  Synthesized sequence with two or more selenocysteine residues substituted for two or more cysteine residues
  VARIANT (1)...(111): Xaa = selenocysteine or cysteine
NSXELTNITIAIEKEECRFCISINTTWXAGYXYTRDLVYKDPARPKIQKTXTFKELVYETVRVPGCAHHADSLYTYPVATQXHXGKCDSDSTDCTVRGLGPSYCSFGEMKE

SEQ ID NO: 1523 - protein, 111 aa, Artificial Sequence
  Synthesized sequence with two or more selenocysteine residues substituted for two or more cysteine residues
  VARIANT (1)...(111): Xaa = selenocysteine or cysteine
NSXELTNITIAIEKEECRFCISINTTWXAGYCYTRDLVYKDPARPKIQKTXTFKELVYETVRVPGCAHHADSLYTYPVATQXHCGKXDSDSTDXTVRGLGPSYCSFGEMKE

SEQ ID NO: 1524 - protein, 111 aa, Artificial Sequence
  Synthesized sequence with two or more selenocysteine residues substituted for two or more cysteine residues
  VARIANT (1)...(111): Xaa = selenocysteine or cysteine
NSXELTNITIAIEKEECRFCISINTTWCAGYXYTRDLVYKDPARPKIQKTXTFKELVYETVRVPGCAHHADSLYTYPVATQCHXGKXDSDSTDXTVRGLGPSYCSFGEMKE

SEQ ID NO: 1525 - protein, 111 aa, Artificial Sequence
  Synthesized sequence with two or more selenocysteine residues substituted for two or more cysteine residues
  VARIANT (1)...(111): Xaa = selenocysteine or cysteine
NSCELTNITIAIEKEEXRFXISINTTWXAGYCYTRDLVYKDPARPKIQKTCTFKELVYETVRVPGXAHHADSLYTYPVATQXHCGKCDSDSTDCTVRGLGPSYXSFGEMKE

SEQ ID NO: 1526 - protein, 111 aa, Artificial Sequence
  Synthesized sequence with two or more selenocysteine residues substituted for two or more cysteine residues
  VARIANT (1)...(111): Xaa = selenocysteine or cysteine
NSCELTNITIAIEKEEXRFXISINTTWCAGYXYTRDLVYKDPARPKIQKTCTFKELVYETVRVPGXAHHADSLYTYPVATQCHXGKCDSDSTDCTVRGLGPSYXSFGEMKE

SEQ ID NO: 1527 - protein, 111 aa, Artificial Sequence
  Synthesized sequence with two or more selenocysteine residues substituted for two or more cysteine residues
  VARIANT (1)...(111): Xaa = selenocysteine or cysteine
NSCELTNITIAIEKEEXRFXISINTTWCAGYCYTRDLVYKDPARPKIQKTCTFKELVYETVRVPGXAHHADSLYTYPVATQCHCGKXDSDSTDXTVRGLGPSYXSFGEMKE

SEQ ID NO: 1528 - protein, 111 aa, Artificial Sequence
  Synthesized sequence with two or more selenocysteine residues substituted for two or more cysteine residues
  VARIANT (1)...(111): Xaa = selenocysteine or cysteine
NSCELTNITIAIEKEEXRFCISINTTWXAGYXYTRDLVYKDPARPKIQKTCTFKELVYETVRVPGXAHHADSLYTYPVATQXHXGKCDSDSTDCTVRGLGPSYCSFGEMKE

SEQ ID NO: 1529 - protein, 111 aa, Artificial Sequence
  Synthesized sequence with two or more selenocysteine residues substituted for two or more cysteine residues
  VARIANT (1)...(111): Xaa = selenocysteine or cysteine
NSCELTNITIAIEKEEXRFCISINTTWXAGYCYTRDLVYKDPARPKIQKTCTFKELVYETVRVPGXAHHADSLYTYPVATQXHCGKXDSDSTDXTVRGLGPSYCSFGEMKE

SEQ ID NO: 1530 - protein, 111 aa, Artificial Sequence
  Synthesized sequence with two or more selenocysteine residues substituted for two or more cysteine residues
  VARIANT (1)...(111): Xaa = selenocysteine or cysteine
NSCELTNITIAIEKEEXRFCISINTTWCAGYXYTRDLVYKDPARPKIQKTCTFKELVYETVRVPGXAHHADSLYTYPVATQCHXGKXDSDSTDXTVRGLGPSYCSFGEMKE

SEQ ID NO: 1531 - protein, 111 aa, Artificial Sequence
  Synthesized sequence with two or more selenocysteine residues substituted for two or more cysteine residues
  VARIANT (1)...(111): Xaa = selenocysteine or cysteine
NSCELTNITIAIEKEECRFXISINTTWXAGYXYTRDLVYKDPARPKIQKTCTFKELVYETVRVPGCAHHADSLYTYPVATQXHXGKCDSDSTDCTVRGLGPSYXSFGEMKE

SEQ ID NO: 1532 - protein, 111 aa, Artificial Sequence
  Synthesized sequence with two or more selenocysteine residues substituted for two or more cysteine residues
  VARIANT (1)...(111): Xaa = selenocysteine or cysteine
NSCELTNITIAIEKEECRFXISINTTWXAGYCYTRDLVYKDPARPKIQKTCTFKELVYETVRVPGCAHHADSLYTYPVATQXHCGKXDSDSTDXTVRGLGPSYXSFGEMKE

SEQ ID NO: 1533 - protein, 111 aa, Artificial Sequence
  Synthesized sequence with two or more selenocysteine residues substituted for two or more cysteine residues
  VARIANT (1)...(111): Xaa = selenocysteine or cysteine
NSCELTNITIAIEKEECRFXISINTTWCAGYXYTRDLVYKDPARPKIQKTCTFKELVYETVRVPGCAHHADSLYTYPVATQCHXGKXDSDSTDXTVRGLGPSYXSFGEMKE

SEQ ID NO: 1534 - protein, 111 aa, Artificial Sequence
  Synthesized sequence with two or more selenocysteine residues substituted for two or more cysteine residues
  VARIANT (1)...(111): Xaa = selenocysteine or cysteine
NSCELTNITIAIEKEECRFCISINTTWXAGYXYTRDLVYKDPARPKIQKTCTFKELVYETVRVPGCAHHADSLYTYPVATQXHXGKXDSDSTDXTVRGLGPSYCSFGEMKE

SEQ ID NO: 1535 - protein, 111 aa, Artificial Sequence
  Synthesized sequence with two or more selenocysteine residues substituted for two or more cysteine residues
  VARIANT (1)...(111): Xaa = selenocysteine or cysteine
NSXELTNITIAIEKEEXRFXISINTTWXAGYCYTRDLVYKDPARPKIQKTXTFKELVYETVRVPGXAHHADSLYTYPVATQXHCGKCDSDSTDCTVRGLGPSYXSFGEMKE

SEQ ID NO: 1536 - protein, 111 aa, Artificial Sequence
  Synthesized sequence with two or more selenocysteine residues substituted for two or more cysteine residues
  VARIANT (1)...(111): Xaa = selenocysteine or cysteine
NSXELTNITIAIEKEEXRFXISINTTWCAGYXYTRDLVYKDPARPKIQKTXTFKELVYETVRVPGXAHHADSLYTYPVATQCHXGKCDSDSTDCTVRGLGPSYXSFGEMKE

SEQ ID NO: 1537 - protein, 111 aa, Artificial Sequence
  Synthesized sequence with two or more selenocysteine residues substituted for two or more cysteine residues
  VARIANT (1)...(111): Xaa = selenocysteine or cysteine
NSXELTNITIAIEKEEXRFXISINTTWCAGYCYTRDLVYKDPARPKIQKTXTFKELVYETVRVPGXAHHADSLYTYPVATQCHCGKXDSDSTDXTVRGLGPSYXSFGEMKE

SEQ ID NO: 1538 - protein, 111 aa, Artificial Sequence
  Synthesized sequence with two or more selenocysteine residues substituted for two or more cysteine residues
  VARIANT (1)...(111): Xaa = selenocysteine or cysteine
NSXELTNITIAIEKEEXRFCISINTTWXAGYXYTRDLVYKDPARPKIQKTXTFKELVYETVRVPGXAHHADSLYTYPVATQXHXGKCDSDSTDCTVRGLGPSYCSFGEMKE

SEQ ID NO: 1539 - protein, 111 aa, Artificial Sequence
  Synthesized sequence with two or more selenocysteine residues substituted for two or more cysteine residues
  VARIANT (1)...(111): Xaa = selenocysteine or cysteine
NSXELTNITIAIEKEEXRFCISINTTWXAGYCYTRDLVYKDPARPKIQKTXTFKELVYETVRVPGXAHHADSLYTYPVATQXHCGKXDSDSTDXTVRGLGPSYCSFGEMKE

SEQ ID NO: 1540 - protein, 111 aa, Artificial Sequence
  Synthesized sequence with two or more selenocysteine residues substituted for two or more cysteine residues
  VARIANT (1)...(111): Xaa = selenocysteine or cysteine
NSXELTNITIAIEKEEXRFCISINTTWCAGYXYTRDLVYKDPARPKIQKTXTFKELVYETVRVPGXAHHADSLYTYPVATQCHXGKXDSDSTDXTVRGLGPSYCSFGEMKE

SEQ ID NO: 1541 - protein, 111 aa, Artificial Sequence
  Synthesized sequence with two or more selenocysteine residues substituted for two or more cysteine residues
  VARIANT (1)...(111): Xaa = selenocysteine or cysteine
NSXELTNITIAIEKEECRFXISINTTWXAGYXYTRDLVYKDPARPKIQKTXTFKELVYETVRVPGCAHHADSLYTYPVATQXHXGKCDSDSTDCTVRGLGPSYXSFGEMKE

SEQ ID NO: 1542 - protein, 111 aa, Artificial Sequence
  Synthesized sequence with two or more selenocysteine residues substituted for two or more cysteine residues
  VARIANT (1)...(111): Xaa = selenocysteine or cysteine
NSXELTNITIAIEKEECRFXISINTTWXAGYCYTRDLVYKDPARPKIQKTXTFKELVYETVRVPGCAHHADSLYTYPVATQXHCGKXDSDSTDXTVRGLGPSYXSFGEMKE

SEQ ID NO: 1543 - protein, 111 aa, Artificial Sequence
  Synthesized sequence with two or more selenocysteine residues substituted for two or more cysteine residues
  VARIANT (1)...(111): Xaa = selenocysteine or cysteine
NSXELTNITIAIEKEECRFXISINTTWCAGYXYTRDLVYKDPARPKIQKTXTFKELVYETVRVPGCAHHADSLYTYPVATQCHXGKXDSDSTDXTVRGLGPSYXSFGEMKE

SEQ ID NO: 1544 - protein, 111 aa, Artificial Sequence
  Synthesized sequence with two or more selenocysteine residues substituted for two or more cysteine residues
  VARIANT (1)...(111): Xaa = selenocysteine or cysteine
NSXELTNITIAIEKEECRFCISINTTWXAGYXYTRDLVYKDPARPKIQKTXTFKELVYETVRVPGCAHHADSLYTYPVATQXHXGKXDSDSTDXTVRGLGPSYCSFGEMKE

SEQ ID NO: 1545 - protein, 111 aa, Artificial Sequence
  Synthesized sequence with two or more selenocysteine residues substituted for two or more cysteine residues
  VARIANT (1)...(111): Xaa = selenocysteine or cysteine
NSCELTNITIAIEKEEXRFXISINTTWXAGYXYTRDLVYKDPARPKIQKTCTFKELVYETVRVPGXAHHADSLYTYPVATQXHXGKCDSDSTDCTVRGLGPSYXSFGEMKE

SEQ ID NO: 1546 - protein, 111 aa, Artificial Sequence
  Synthesized sequence with two or more selenocysteine residues substituted for two or more cysteine residues
  VARIANT (1)...(111): Xaa = selenocysteine or cysteine
NSCELTNITIAIEKEEXRFXISINTTWXAGYCYTRDLVYKDPARPKIQKTCTFKELVYETVRVPGXAHHADSLYTYPVATQXHCGKXDSDSTDXTVRGLGPSYXSFGEMKE

SEQ ID NO: 1547 - protein, 111 aa, Artificial Sequence
  Synthesized sequence with two or more selenocysteine residues substituted for two or more cysteine residues
  VARIANT (1)...(111): Xaa = selenocysteine or cysteine
NSCELTNITIAIEKEEXRFXISINTTWCAGYXYTRDLVYKDPARPKIQKTCTFKELVYETVRVPGXAHHADSLYTYPVATQCHXGKXDSDSTDXTVRGLGPSYXSFGEMKE

SEQ ID NO: 1548 - protein, 111 aa, Artificial Sequence
  Synthesized sequence with two or more selenocysteine residues substituted for two or more cysteine residues
  VARIANT (1)...(111): Xaa = selenocysteine or cysteine
NSCELTNITIAIEKEEXRFCISINTTWXAGYXYTRDLVYKDPARPKIQKTCTFKELVYETVRVPGXAHHADSLYTYPVATQXHXGKXDSDSTDXTVRGLGPSYCSFGEMKE

SEQ ID NO: 1549 - protein, 111 aa, Artificial Sequence
  Synthesized sequence with two or more selenocysteine residues substituted for two or more cysteine residues
  VARIANT (1)...(111): Xaa = selenocysteine or cysteine
NSCELTNITIAIEKEECRFXISINTTWXAGYXYTRDLVYKDPARPKIQKTCTFKELVYETVRVPGCAHHADSLYTYPVATQXHXGKXDSDSTDXTVRGLGPSYXSFGEMKE

SEQ ID NO: 1550 - protein, 111 aa, Artificial Sequence
  Synthesized sequence with two or more selenocysteine residues substituted for two or more cysteine residues
  VARIANT (1)...(111): Xaa = selenocysteine or cysteine
NSXELTNITIAIEKEEXRFXISINTTWXAGYXYTRDLVYKDPARPKIQKTXTFKELVYETVRVPGXAHHADSLYTYPVATQXHXGKCDSDSTDCTVRGLGPSYXSFGEMKE

SEQ ID NO: 1551 - protein, 111 aa, Artificial Sequence
  Synthesized sequence with two or more selenocysteine residues substituted for two or more cysteine residues
  VARIANT (1)...(111): Xaa = selenocysteine or cysteine
NSXELTNITIAIEKEEXRFXISINTTWXAGYCYTRDLVYKDPARPKIQKTXTFKELVYETVRVPGXAHHADSLYTYPVATQXHCGKXDSDSTDXTVRGLGPSYXSFGEMKE

SEQ ID NO: 1552 - protein, 111 aa, Artificial Sequence
  Synthesized sequence with two or more selenocysteine residues substituted for two or more cysteine residues
  VARIANT (1)...(111): Xaa = selenocysteine or cysteine
NSXELTNITIAIEKEEXRFXISINTTWCAGYXYTRDLVYKDPARPKIQKTXTFKELVYETVRVPGXAHHADSLYTYPVATQCHXGKXDSDSTDXTVRGLGPSYXSFGEMKE

SEQ ID NO: 1553 - protein, 111 aa, Artificial Sequence
  Synthesized sequence with two or more selenocysteine residues substituted for two or more cysteine residues
  VARIANT (1)...(111): Xaa = selenocysteine or cysteine
NSXELTNITIAIEKEEXRFCISINTTWXAGYXYTRDLVYKDPARPKIQKTXTFKELVYETVRVPGXAHHADSLYTYPVATQXHXGKXDSDSTDXTVRGLGPSYCSFGEMKE

SEQ ID NO: 1554 - protein, 111 aa, Artificial Sequence
  Synthesized sequence with two or more selenocysteine residues substituted for two or more cysteine residues
  VARIANT (1)...(111): Xaa = selenocysteine or cysteine
NSXELTNITIAIEKEECRFXISINTTWXAGYXYTRDLVYKDPARPKIQKTXTFKELVYETVRVPGCAHHADSLYTYPVATQXHXGKXDSDSTDXTVRGLGPSYXSFGEMKE

SEQ ID NO: 1555 - protein, 111 aa, Artificial Sequence
  Synthesized sequence with two or more selenocysteine residues substituted for two or more cysteine residues
  VARIANT (1)...(111): Xaa = selenocysteine or cysteine
NSCELTNITIAIEKEEXRFXISINTTWXAGYXYTRDLVYKDPARPKIQKTCTFKELVYETVRVPGXAHHADSLYTYPVATQXHXGKXDSDSTDXTVRGLGPSYXSFGEMKE

SEQ ID NO: 1556 - protein, 111 aa, Artificial Sequence; identical to SEQ ID NO: 1198
  Synthesized sequence with two or more selenocysteine residues substituted for two or more cysteine residues
  VARIANT (1)...(111): Xaa = selenocysteine or cysteine

SEQ ID NO: 1557 - protein, 111 aa, Artificial Sequence
  Synthesized sequence with two or more selenocysteine residues substituted for two or more cysteine residues
  VARIANT (1)...(111): Xaa = selenocysteine or cysteine
NSXELTNITIAIEKEECRFCISINTTWCAGYCYTRDLVYKDPARPKIQKTXTPKELVYETVRVPGCAHHADSLYTYPVATQCHCGKCDSDSTDCTVRGLGPSYCSFGEMKE

SEQ ID NO: 1558 - protein, 111 aa, Artificial Sequence
  Synthesized sequence with two or more selenocysteine residues substituted for two or more cysteine residues
  VARIANT (1)...(111): Xaa = selenocysteine or cysteine
NSCELTNITIAIEKEEXRFCISINTTWCAGYCYTRDLVYKDPARPKIQKTCTPKELVYETVRVPGXAHHADSLYTYPVATQCHCGKCDSDSTDCTVRGLGPSYCSFGEMKE

SEQ ID NO: 1559 - protein, 111 aa, Artificial Sequence
  Synthesized sequence with two or more selenocysteine residues substituted for two or more cysteine residues
  VARIANT (1)...(111): Xaa = selenocysteine or cysteine
NSCELTNITIAIEKEECRFXISINTTWCAGYCYTRDLVYKDPARPKIQKTCTPKELVYETVRVPGCAHHADSLYTYPVATQCHCGKCDSDSTDCTVRGLGPSYXSFGEMKE

SEQ ID NO: 1560 - protein, 111 aa, Artificial Sequence
  Synthesized sequence with two or more selenocysteine residues substituted for two or more cysteine residues
  VARIANT (1)...(111): Xaa = selenocysteine or cysteine
NSCELTNITIAIEKEECRFCISINTTWXAGYCYTRDLVYKDPARPKIQKTCTPKELVYETVRVPGCAHHADSLYTYPVATQXHCGKCDSDSTDCTVRGLGPSYCSFGEMKE

SEQ ID NO: 1561 - protein, 111 aa, Artificial Sequence
  Synthesized sequence with two or more selenocysteine residues substituted for two or more cysteine residues
  VARIANT (1)...(111): Xaa = selenocysteine or cysteine
NSCELTNITIAIEKEECRFCISINTTWCAGYXYTRDLVYKDPARPKIQKTCTPKELVYETVRVPGCAHHADSLYTYPVATQCHXGKCDSDSTDCTVRGLGPSYCSFGEMKE

SEQ ID NO: 1562 - protein, 111 aa, Artificial Sequence
  Synthesized sequence with two or more selenocysteine residues substituted for two or more cysteine residues
  VARIANT (1)...(111): Xaa = selenocysteine or cysteine
NSCELTNITIAIEKEECRFCISINTTWCAGYCYTRDLVYKDPARPKIQKTCTPKELVYETVRVPGCAHHADSLYTYPVATQCHCGKXDSDSTDXTVRGLGPSYCSFGEMKE

SEQ ID NO: 1563 - protein, 111 aa, Artificial Sequence
  Synthesized sequence with two or more selenocysteine residues substituted for two or more cysteine residues
  VARIANT (1)...(111): Xaa = selenocysteine or cysteine
NSXELTNITIAIEKEEXRFCISINTTWCAGYCYTRDLVYKDPARPKIQKTXTPKELVYETVRVPGXAHHADSLYTYPVATQCHCGKCDSDSTDCTVRGLGPSYCSFGEMKE

SEQ ID NO: 1564 - protein, 111 aa, Artificial Sequence
  Synthesized sequence with two or more selenocysteine residues substituted for two or more cysteine residues
  VARIANT (1)...(111): Xaa = selenocysteine or cysteine
NSXELTNITIAIEKEECRFXISINTTWCAGYCYTRDLVYKDPARPKIQKTXTPKELVYETVRVPGCAHHADSLYTYPVATQCHCGKCDSDSTDCTVRGLGPSYXSFGEMKE

SEQ ID NO: 1565 - protein, 111 aa, Artificial Sequence
  Synthesized sequence with two or more selenocysteine residues substituted for two or more cysteine residues
  VARIANT (1)...(111): Xaa = selenocysteine or cysteine
NSXELTNITIAIEKEECRFCISINTTWXAGYCYTRDLVYKDPARPKIQKTXTPKELVYETVRVPGCAHHADSLYTYPVATQXHCGKCDSDSTDCTVRGLGPSYCSFGEMKE

SEQ ID NO: 1566 - protein, 111 aa, Artificial Sequence
  Synthesized sequence with two or more selenocysteine residues substituted for two or more cysteine residues
  VARIANT (1)...(111): Xaa = selenocysteine or cysteine
NSXELTNITIAIEKEECRFCISINTTWCAGYXYTRDLVYKDPARPKIQKTXTPKELVYETVRVPGCAHHADSLYTYPVATQCHXGKCDSDSTDCTVRGLGPSYCSFGEMKE

SEQ ID NO: 1567 - protein, 111 aa, Artificial Sequence
  Synthesized sequence with two or more selenocysteine residues substituted for two or more cysteine residues
  VARIANT (1)...(111): Xaa = selenocysteine or cysteine
NSXELTNITIAIEKEECRFCISINTTWCAGYCYTRDLVYKDPARPKIQKTXTPKELVYETVRVPGCAHHADSLYTYPVATQCHCGKXDSDSTDXTVRGLGPSYCSFGEMKE

SEQ ID NO: 1568 - protein, 111 aa, Artificial Sequence
  Synthesized sequence with two or more selenocysteine residues substituted for two or more cysteine residues
  VARIANT (1)...(111): Xaa = selenocysteine or cysteine
NSCELTNITIAIEKEEXRFXISINTTWCAGYCYTRDLVYKDPARPKIQKTCTPKELVYETVRVPGXAHHADSLYTYPVATQCHCGKCDSDSTDCTVRGLGPSYXSFGEMKE

SEQ ID NO: 1569 - protein, 111 aa, Artificial Sequence
  Synthesized sequence with two or more selenocysteine residues substituted for two or more cysteine residues
  VARIANT (1)...(111): Xaa = selenocysteine or cysteine
NSCELTNITIAIEKEEXRFCISINTTWXAGYCYTRDLVYKDPARPKIQKTCTPKELVYETVRVPGXAHHADSLYTYPVATQXHCGKCDSDSTDCTVRGLGPSYCSFGEMKE

SEQ ID NO: 1570 - protein, 111 aa, Artificial Sequence
  Synthesized sequence with two or more selenocysteine residues substituted for two or more cysteine residues
  VARIANT (1)...(111): Xaa = selenocysteine or cysteine
NSCELTNITIAIEKEEXRFCISINTTWCAGYXYTRDLVYKDPARPKIQKTCTPKELVYETVRVPGXAHHADSLYTYPVATQCHXGKCDSDSTDCTVRGLGPSYCSFGEMKE

SEQ ID NO: 1571 - protein, 111 aa, Artificial Sequence
  Synthesized sequence with two or more selenocysteine residues substituted for two or more cysteine residues
  VARIANT (1)...(111): Xaa = selenocysteine or cysteine
NSCELTNITIAIEKEEXRFCISINTTWCAGYCYTRDLVYKDPARPKIQKTCTPKELVYETVRVPGXAHHADSLYTYPVATQCHCGKXDSDSTDXTVRGLGPSYCSFGEMKE

SEQ ID NO: 1572 - protein, 111 aa, Artificial Sequence
  Synthesized sequence with two or more selenocysteine residues substituted for two or more cysteine residues
  VARIANT (1)...(111): Xaa = selenocysteine or cysteine
NSCELTNITIAIEKEECRFXISINTTWXAGYCYTRDLVYKDPARPKIQKTCTPKELVYETVRVPGCAHHADSLYTYPVATQXHCGKCDSDSTDCTVRGLGPSYXSFGEMKE

SEQ ID NO: 1573 - protein, 111 aa, Artificial Sequence
  Synthesized sequence with two or more selenocysteine residues substituted for two or more cysteine residues
  VARIANT (1)...(111): Xaa = selenocysteine or cysteine
NSCELTNITIAIEKEECRFXISINTTWCAGYXYTRDLVYKDPARPKIQKTCTPKELVYETVRVPGCAHHADSLYTYPVATQCHXGKCDSDSTDCTVRGLGPSYXSFGEMKE

SEQ ID NO: 1574 - protein, 111 aa, Artificial Sequence
  Synthesized sequence with two or more selenocysteine residues substituted for two or more cysteine residues
  VARIANT (1)...(111): Xaa = selenocysteine or cysteine
NSCELTNITIAIEKEECRFXISINTTWCAGYCYTRDLVYKDPARPKIQKTCTPKELVYETVRVPGCAHHADSLYTYPVATQCHCGKXDSDSTDXTVRGLGPSYXSFGEMKE

SEQ ID NO: 1575 - protein, 111 aa, Artificial Sequence
  Synthesized sequence with two or more selenocysteine residues substituted for two or more cysteine residues
  VARIANT (1)...(111): Xaa = selenocysteine or cysteine
NSCELTNITIAIEKEECRFCISINTTWXAGYXYTRDLVYKDPARPKIQKTCTPKELVYETVRVPGCAHHADSLYTYPVATQXHXGKCDSDSTDCTVRGLGPSYCSFGEMKE

SEQ ID NO: 1576 - protein, 111 aa, Artificial Sequence
  Synthesized sequence with two or more selenocysteine residues substituted for two or more cysteine residues
  VARIANT (1)...(111): Xaa = selenocysteine or cysteine
NSCELTNITIAIEKEECRFCISINTTWXAGYCYTRDLVYKDPARPKIQKTCTPKELVYETVRVPGCAHHADSLYTYPVATQXHCGKXDSDSTDXTVRGLGPSYCSFGEMKE

SEQ ID NO: 1577 - protein, 111 aa, Artificial Sequence
  Synthesized sequence with two or more selenocysteine residues substituted for two or more cysteine residues
  VARIANT (1)...(111): Xaa = selenocysteine or cysteine
NSCELTNITIAIEKEECRFCISINTTWCAGYXYTRDLVYKDPARPKIQKTCTPKELVYETVRVPGCAHHADSLYTYPVATQCHXGKXDSDSTDXTVRGLGPSYCSFGEMKE

SEQ ID NO: 1578 - protein, 111 aa, Artificial Sequence
  Synthesized sequence with two or more selenocysteine residues substituted for two or more cysteine residues
  VARIANT (1)...(111): Xaa = selenocysteine or cysteine
NSXELTNITIAIEKEEXRFXISINTTWCAGYCYTRDLVYKDPARPKIQKTXTPKELVYETVRVPGXAHHADSLYTYPVATQCHCGKCDSDSTDCTVRGLGPSYXSFGEMKE

SEQ ID NO: 1579 - protein, 111 aa, Artificial Sequence
  Synthesized sequence with two or more selenocysteine residues substituted for two or more cysteine residues
  VARIANT (1)...(111): Xaa = selenocysteine or cysteine
NSXELTNITIAIEKEEXRFCISINTTWXAGYCYTRDLVYKDPARPKIQKTXTPKELVYETVRVPGXAHHADSLYTYPVATQXHCGKCDSDSTDCTVRGLGPSYCSFGEMKE

SEQ ID NO: 1580 - protein, 111 aa, Artificial Sequence
  Synthesized sequence with two or more selenocysteine residues substituted for two or more cysteine residues
  VARIANT (1)...(111): Xaa = selenocysteine or cysteine
NSXELTNITIAIEKEEXRFCISINTTWCAGYXYTRDLVYKDPARPKIQKTXTPKELVYETVRVPGXAHHADSLYTYPVATQCHXGKCDSDSTDCTVRGLGPSYCSFGEMKE

SEQ ID NO: 1581 - protein, 111 aa, Artificial Sequence
  Synthesized sequence with two or more selenocysteine residues substituted for two or more cysteine residues
  VARIANT (1)...(111): Xaa = selenocysteine or cysteine
NSXELTNITIAIEKEEXRFCISINTTWCAGYCYTRDLVYKDPARPKIQKTXTPKELVYETVRVPGXAHHADSLYTYPVATQCHCGKXDSDSTDXTVRGLGPSYCSFGEMKE

SEQ ID NO: 1582 - protein, 111 aa, Artificial Sequence
  Synthesized sequence with two or more selenocysteine residues substituted for two or more cysteine residues
  VARIANT (1)...(111): Xaa = selenocysteine or cysteine
NSXELTNITIAIEKEECRFXISINTTWXAGYCYTRDLVYKDPARPKIQKTXTPKELVYETVRVPGCAHHADSLYTYPVATQXHCGKCDSDSTDCTVRGLGPSYXSFGEMKE

SEQ ID NO: 1583 - protein, 111 aa, Artificial Sequence
  Synthesized sequence with two or more selenocysteine residues substituted for two or more cysteine residues
  VARIANT (1)...(111): Xaa = selenocysteine or cysteine
NSXELTNITIAIEKEECRFXISINTTWCAGYXYTRDLVYKDPARPKIQKTXTPKELVYETVRVPGCAHHADSLYTYPVATQCHXGKCDSDSTDCTVRGLGPSYXSFGEMKE

SEQ ID NO: 1584 - protein, 111 aa, Artificial Sequence
  Synthesized sequence with two or more selenocysteine residues substituted for two or more cysteine residues
  VARIANT (1)...(111): Xaa = selenocysteine or cysteine
NSXELTNITIAIEKEECRFXISINTTWCAGYCYTRDLVYKDPARPKIQKTXTPKELVYETVRVPGCAHHADSLYTYPVATQCHCGKXDSDSTDXTVRGLGPSYXSFGEMKE

SEQ ID NO: 1585 - protein, 111 aa, Artificial Sequence
  Synthesized sequence with two or more selenocysteine residues substituted for two or more cysteine residues
  VARIANT (1)...(111): Xaa = selenocysteine or cysteine
NSXELTNITIAIEKEECRFCISINTTWXAGYXYTRDLVYKDPARPKIQKTXTPKELVYETVRVPGCAHHADSLYTYPVATQXHXGKCDSDSTDCTVRGLGPSYCSFGEMKE

SEQ ID NO: 1586 - protein, 111 aa, Artificial Sequence
  Synthesized sequence with two or more selenocysteine residues substituted for two or more cysteine residues
  VARIANT (1)...(111): Xaa = selenocysteine or cysteine
NSXELTNITIAIEKEECRFCISINTTWXAGYCYTRDLVYKDPARPKIQKTXTPKELVYETVRVPGCAHHADSLYTYPVATQXHCGKXDSDSTDXTVRGLGPSYCSFGEMKE

SEQ ID NO: 1587 - protein, 111 aa, Artificial Sequence
  Synthesized sequence with two or more selenocysteine residues substituted for two or more cysteine residues
  VARIANT (1)...(111): Xaa = selenocysteine or cysteine
NSXELTNITIAIEKEECRFCISINTTWCAGYXYTRDLVYKDPARPKIQKTXTPKELVYETVRVPGCAHHADSLYTYPVATQCHXGKXDSDSTDXTVRGLGPSYCSFGEMKE

SEQ ID NO: 1588 - protein, 111 aa, Artificial Sequence
  Synthesized sequence with two or more selenocysteine residues substituted for two or more cysteine residues
  VARIANT (1)...(111): Xaa = selenocysteine or cysteine
NSCELTNITIAIEKEEXRFXISINTTWXAGYCYTRDLVYKDPARPKIQKTCTPKELVYETVRVPGXAHHADSLYTYPVATQXHCGKCDSDSTDCTVRGLGPSYXSFGEMKE

SEQ ID NO: 1589 - protein, 111 aa, Artificial Sequence
  Synthesized sequence with two or more selenocysteine residues substituted for two or more cysteine residues
  VARIANT (1)...(111): Xaa = selenocysteine or cysteine
NSCELTNITIAIEKEEXRFXISINTTWCAGYXYTRDLVYKDPARPKIQKTCTPKELVYETVRVPGXAHHADSLYTYPVATQCHXGKCDSDSTDCTVRGLGPSYXSFGEMKE

SEQ ID NO: 1590 - protein, 111 aa, Artificial Sequence
  Synthesized sequence with two or more selenocysteine residues substituted for two or more cysteine residues
  VARIANT (1)...(111): Xaa = selenocysteine or cysteine
NSCELTNITIAIEKEEXRFXISINTTWCAGYCYTRDLVYKDPARPKIQKTCTPKELVYETVRVPGXAHHADSLYTYPVATQCHCGKXDSDSTDXTVRGLGPSYXSFGEMKE

SEQ ID NO: 1591 - protein, 111 aa, Artificial Sequence
  Synthesized sequence with two or more selenocysteine residues substituted for two or more cysteine residues
  VARIANT (1)...(111): Xaa = selenocysteine or cysteine
NSCELTNITIAIEKEEXRFCISINTTWXAGYXYTRDLVYKDPARPKIQKTCTPKELVYETVRVPGXAHHADSLYTYPVATQXHXGKCDSDSTDCTVRGLGPSYCSFGEMKE

SEQ ID NO: 1592 - protein, 111 aa, Artificial Sequence
  Synthesized sequence with two or more selenocysteine residues substituted for two or more cysteine residues
  VARIANT (1)...(111): Xaa = selenocysteine or cysteine
NSCELTNITIAIEKEEXRFCISINTTWXAGYCYTRDLVYKDPARPKIQKTCTPKELVYETVRVPGXAHHADSLYTYPVATQXHCGKXDSDSTDXTVRGLGPSYCSFGEMKE

SEQ ID NO: 1593 - protein, 111 aa, Artificial Sequence
  Synthesized sequence with two or more selenocysteine residues substituted for two or more cysteine residues
  VARIANT (1)...(111): Xaa = selenocysteine or cysteine
NSCELTNITIAIEKEEXRFCISINTTWCAGYXYTRDLVYKDPARPKIQKTCTPKELVYETVRVPGXAHHADSLYTYPVATQCHXGKXDSDSTDXTVRGLGPSYCSFGEMKE

SEQ ID NO: 1594 - protein, 111 aa, Artificial Sequence
  Synthesized sequence with two or more selenocysteine residues substituted for two or more cysteine residues
  VARIANT (1)...(111): Xaa = selenocysteine or cysteine
NSCELTNITIAIEKEECRFXISINTTWXAGYXYTRDLVYKDPARPKIQKTCTPKELVYETVRVPGCAHHADSLYTYPVATQXHXGKCDSDSTDCTVRGLGPSYXSFGEMKE

SEQ ID NO: 1595 - protein, 111 aa, Artificial Sequence
  Synthesized sequence with two or more selenocysteine residues substituted for two or more cysteine residues
  VARIANT (1)...(111): Xaa = selenocysteine or cysteine
NSCELTNITIAIEKEECRFXISINTTWXAGYCYTRDLVYKDPARPKIQKTCTPKELVYETVRVPGCAHHADSLYTYPVATQXHCGKXDSDSTDXTVRGLGPSYXSFGEMKE

SEQ ID NO: 1596 - protein, 111 aa, Artificial Sequence
  Synthesized sequence with two or more selenocysteine residues substituted for two or more cysteine residues
  VARIANT (1)...(111): Xaa = selenocysteine or cysteine
NSCELTNITIAIEKEECRFXISINTTWCAGYXYTRDLVYKDPARPKIQKTCTPKELVYETVRVPGCAHHADSLYTYPVATQCHXGKXDSDSTDXTVRGLGPSYXSFGEMKE

SEQ ID NO: 1597 - protein, 111 aa, Artificial Sequence
  Synthesized sequence with two or more selenocysteine residues substituted for two or more cysteine residues
  VARIANT (1)...(111): Xaa = selenocysteine or cysteine
NSCELTNITIAIEKEECRFCISINTTWXAGYXYTRDLVYKDPARPKIQKTCTPKELVYETVRVPGCAHHADSLYTYPVATQXHXGKXDSDSTDXTVRGLGPSYCSFGEMKE

SEQ ID NO: 1598 - protein, 111 aa, Artificial Sequence
  Synthesized sequence with two or more selenocysteine residues substituted for two or more cysteine residues
  VARIANT (1)...(111): Xaa = selenocysteine or cysteine
NSXELTNITIAIEKEEXRFXISINTTWXAGYCYTRDLVYKDPARPKIQKTXTPKELVYETVRVPGXAHHADSLYTYPVATQXHCGKCDSDSTDCTVRGLGPSYXSFGEMKE

SEQ ID NO: 1599 - protein, 111 aa, Artificial Sequence
  Synthesized sequence with two or more selenocysteine residues substituted for two or more cysteine residues
  VARIANT (1)...(111): Xaa = selenocysteine or cysteine
NSXELTNITIAIEKEEXRFXISINTTWCAGYXYTRDLVYKDPARPKIQKTXTPKELVYETVRVPGXAHHADSLYTYPVATQCHXGKCDSDSTDCTVRGLGPSYXSFGEMKE

SEQ ID NO: 1600 - protein, 111 aa, Artificial Sequence
  Synthesized sequence with two or more selenocysteine residues substituted for two or more cysteine residues
  VARIANT (1)...(111): Xaa = selenocysteine or cysteine
NSXELTNITIAIEKEEXRFXISINTTWCAGYCYTRDLVYKDPARPKIQKTXTPKELVYETVRVPGXAHHADSLYTYPVATQCHCGKXDSDSTDXTVRGLGPSYXSFGEMKE

SEQ ID NO: 1601 - protein, 111 aa, Artificial Sequence
  Synthesized sequence with two or more selenocysteine residues substituted for two or more cysteine residues
  VARIANT (1)...(111): Xaa = selenocysteine or cysteine
NSXELTNITIAIEKEEXRFCISINTTWXAGYXYTRDLVYKDPARPKIQKTXTPKELVYETVRVPGXAHHADSLYTYPVATQXHXGKCDSDSTDCTVRGLGPSYCSFGEMKE

SEQ ID NO: 1602 - protein, 111 aa, Artificial Sequence
  Synthesized sequence with two or more selenocysteine residues substituted for two or more cysteine residues
  VARIANT (1)...(111): Xaa = selenocysteine or cysteine
NSXELTNITIAIEKEEXRFCISINTTWXAGYCYTRDLVYKDPARPKIQKTXTPKELVYETVRVPGXAHHADSLYTYPVATQXHCGKXDSDSTDXTVRGLGPSYCSFGEMKE

SEQ ID NO: 1603 - protein, 111 aa, Artificial Sequence
  Synthesized sequence with two or more selenocysteine residues substituted for two or more cysteine residues
  VARIANT (1)...(111): Xaa = selenocysteine or cysteine
NSXELTNITIAIEKEEXRFCISINTTWCAGYXYTRDLVYKDPARPKIQKTXTPKELVYETVRVPGXAHHADSLYTYPVATQCHXGKXDSDSTDXTVRGLGPSYCSFGEMKE

SEQ ID NO: 1604 - protein, 111 aa, Artificial Sequence
  Synthesized sequence with two or more selenocysteine residues substituted for two or more cysteine residues
  VARIANT (1)...(111): Xaa = selenocysteine or cysteine
NSXELTNITIAIEKEECRFXISINTTWXAGYXYTRDLVYKDPARPKIQKTXTPKELVYETVRVPGCAHHADSLYTYPVATQXHXGKCDSDSTDCTVRGLGPSYXSFGEMKE

SEQ ID NO: 1605 - protein, 111 aa, Artificial Sequence
  Synthesized sequence with two or more selenocysteine residues substituted for two or more cysteine residues
  VARIANT (1)...(111): Xaa = selenocysteine or cysteine
NSXELTNITIAIEKEECRFXISINTTWXAGYCYTRDLVYKDPARPKIQKTXTPKELVYETVRVPGCAHHADSLYTYPVATQXHCGKXDSDSTDXTVRGLGPSYXSFGEMKE

SEQ ID NO: 1606 - protein, 111 aa, Artificial Sequence
  Synthesized sequence with two or more selenocysteine residues substituted for two or more cysteine residues
  VARIANT (1)...(111): Xaa = selenocysteine or cysteine
NSXELTNITIAIEKEECRFXISINTTWCAGYXYTRDLVYKDPARPKIQKTXTPKELVYETVRVPGCAHHADSLYTYPVATQCHXGKXDSDSTDXTVRGLGPSYXSFGEMKE

SEQ ID NO: 1607 - protein, 111 aa, Artificial Sequence
  Synthesized sequence with two or more selenocysteine residues substituted for two or more cysteine residues
  VARIANT (1)...(111): Xaa = selenocysteine or cysteine
NSXELTNITIAIEKEECRFCISINTTWXAGYXYTRDLVYKDPARPKIQKTXTPKELVYETVRVPGCAHHADSLYTYPVATQXHXGKXDSDSTDXTVRGLGPSYCSFGEMKE

SEQ ID NO: 1608 - protein, 111 aa, Artificial Sequence
  Synthesized sequence with two or more selenocysteine residues substituted for two or more cysteine residues
  VARIANT (1)...(111): Xaa = selenocysteine or cysteine
NSCELTNITIAIEKEEXRFXISINTTWXAGYXYTRDLVYKDPARPKIQKTCTPKELVYETVRVPGXAHHADSLYTYPVATQXHXGKCDSDSTDCTVRGLGPSYXSFGEMKE

SEQ ID NO: 1609 - protein, 111 aa, Artificial Sequence
  Synthesized sequence with two or more selenocysteine residues substituted for two or more cysteine residues
  VARIANT (1)...(111): Xaa = selenocysteine or cysteine
NSCELTNITIAIEKEEXRFXISINTTWXAGYCYTRDLVYKDPARPKIQKTCTPKELVYETVRVPGXAHHADSLYTYPVATQXHCGKXDSDSTDXTVRGLGPSYXSFGEMKE

SEQ ID NO: 1610 - protein, 111 aa, Artificial Sequence
  Synthesized sequence with two or more selenocysteine residues substituted for two or more cysteine residues
  VARIANT (1)...(111): Xaa = selenocysteine or cysteine
NSCELTNITIAIEKEEXRFXISINTTWCAGYXYTRDLVYKDPARPKIQKTCTPKELVYETVRVPGXAHHADSLYTYPVATQCHXGKXDSDSTDXTVRGLGPSYXSFGEMKE

SEQ ID NO: 1611 - protein, 111 aa, Artificial Sequence
  Synthesized sequence with two or more selenocysteine residues substituted for two or more cysteine residues
  VARIANT (1)...(111): Xaa = selenocysteine or cysteine
NSCELTNITIAIEKEEXRFCISINTTWXAGYXYTRDLVYKDPARPKIQKTCTPKELVYETVRVPGXAHHADSLYTYPVATQXHXGKXDSDSTDXTVRGLGPSYCSFGEMKE

SEQ ID NO: 1612 - protein, 111 aa, Artificial Sequence
  Synthesized sequence with two or more selenocysteine residues substituted for two or more cysteine residues
  VARIANT (1)...(111): Xaa = selenocysteine or cysteine
NSCELTNITIAIEKEECRFXISINTTWXAGYXYTRDLVYKDPARPKIQKTCTPKELVYETVRVPGCAHHADSLYTYPVATQXHXGKXDSDSTDXTVRGLGPSYXSFGEMKE

SEQ ID NO: 1613 - protein, 111 aa, Artificial Sequence
  Synthesized sequence with two or more selenocysteine residues substituted for two or more cysteine residues
  VARIANT (1)...(111): Xaa = selenocysteine or cysteine
NSXELTNITIAIEKEEXRFXISINTTWXAGYXYTRDLVYKDPARPKIQKTXTPKELVYETVRVPGXAHHADSLYTYPVATQXHXGKCDSDSTDCTVRGLGPSYXSFGEMKE

SEQ ID NO: 1614 - protein, 111 aa, Artificial Sequence
  Synthesized sequence with two or more selenocysteine residues substituted for two or more cysteine residues
  VARIANT (1)...(111): Xaa = selenocysteine or cysteine
NSXELTNITIAIEKEEXRFXISINTTWXAGYCYTRDLVYKDPARPKIQKTXTPKELVYETVRVPGXAHHADSLYTYPVATQXHCGKXDSDSTDXTVRGLGPSYXSFGEMKE

SEQ ID NO: 1615 - protein, 111 aa, Artificial Sequence
  Synthesized sequence with two or more selenocysteine residues substituted for two or more cysteine residues
  VARIANT (1)...(111): Xaa = selenocysteine or cysteine
NSXELTNITIAIEKEEXRFXISINTTWCAGYXYTRDLVYKDPARPKIQKTXTPKELVYETVRVPGXAHHADSLYTYPVATQCHXGKXDSDSTDXTVRGLGPSYXSFGEMKE

SEQ ID NO: 1616 - protein, 111 aa, Artificial Sequence
  Synthesized sequence with two or more selenocysteine residues substituted for two or more cysteine residues
  VARIANT (1)...(111): Xaa = selenocysteine or cysteine
NSXELTNITIAIEKEEXRFCISINTTWXAGYXYTRDLVYKDPARPKIQKTXTPKELVYETVRVPGXAHHADSLYTYPVATQXHXGKXDSDSTDXTVRGLGPSYCSFGEMKE

SEQ ID NO: 1617 - protein, 111 aa, Artificial Sequence
  Synthesized sequence with two or more selenocysteine residues substituted for two or more cysteine residues
  VARIANT (1)...(111): Xaa = selenocysteine or cysteine
NSXELTNITIAIEKEECRFXISINTTWXAGYXYTRDLVYKDPARPKIQKTXTPKELVYETVRVPGCAHHADSLYTYPVATQXHXGKXDSDSTDXTVRGLGPSYXSFGEMKE

SEQ ID NO: 1618 - protein, 111 aa, Artificial Sequence
  Synthesized sequence with two or more selenocysteine residues substituted for two or more cysteine residues
  VARIANT (1)...(111): Xaa = selenocysteine or cysteine
NSCELTNITIAIEKEEXRFXISINTTWXAGYXYTRDLVYKDPARPKIQKTCTPKELVYETVRVPGXAHHADSLYTYPVATQXHXGKXDSDSTDXTVRGLGPSYXSFGEMKE

SEQ ID NO: 1619 - protein, 111 aa, Artificial Sequence; identical to SEQ ID NO: 1200
  Synthesized sequence with two or more selenocysteine residues substituted for two or more cysteine residues
  VARIANT (1)...(111): Xaa = selenocysteine or cysteine

SEQ ID NO: 1620 - protein, 229 aa, Artificial Sequence
  Synthesized sequence with two or more selenocysteine residues substituted for two or more cysteine residues
  VARIANT (1)...(229): Xaa = selenocysteine or cysteine
MFTVTVPKDLYVVEYGSNMTIEXKFPVEKQLDLAALIVYWEMEDKNIIQFVHGEEDLKVQHSSYRQRARLLKDQLSLGNAALQITDVKLQDAGVYRXMISYGGADYKRITVKVNAPYNKINQRILVVDPVTSEHELTXQAEGYPKAEVIWTSSDHQVLSGKTTTTNSKREEKLFNVTSTLRINTTTNEIFYXTFRRLDPEENHTAELVIPELPLAHPPNERGSHHHHHH

SEQ ID NO: 1621 - protein, 461 aa, Artificial Sequence
  Synthesized sequence with two or more selenocysteine residues substituted for two or more cysteine residues
  VARIANT (1)...(461): Xaa = selenocysteine or cysteine
MFTVTVPKDLYVVEYGSNMTIEXKFPVEKQLDLAALIVYWEMEDKNIIQFVHGEEDLKVQHSSYRQRARLLKDQLSLGNAALQITDVKLQDAGVYRXMISYGGADYKRITVKVNAPYNKINQRILVVDPVTSEHELTXQAEGYPKAEVIWTSSDHQVLSGKTTTTNSKREEKLFNVTSTLRINTTTNEIFYXTFRRLDPEENHTAELVIPELPLAHPPNERGGGGSGGGGSGGGGSAPELLGGPSVFLFPPKPKDTLMISRTPEVTXVVVDVSHEDPEVKFNWYVDGVEVHNAKTKPREEQYNSTYRVVSVLTVLHQDWLNGKEYKXKVSNKALPAPIEKTISKAKGQPREPQVYTKPPSRDELTKNQVSLSXLVKGFYPSDIAVEWESNGQPENNYKTTVPVLDSDGSFRLASYLTVDKSRWQQGNVFSXSVMHEALHNHYTQKSLSLSPGKGSHHHHHH

SEQ ID NO: 1622 - protein, 126 aa, Artificial Sequence
  Synthesized sequence with two or more selenocysteine residues substituted for two or more cysteine residues
  VARIANT (1)...(126): Xaa = selenocysteine or cysteine
MAFTVTVPKDLYVVEYGSNMTIEXKFPVEKQLDLAALIVYWEMEDKNIIQFVHGEEDLKVQHSSYRQRARLLKDQLSLGNAALQITDVKLQDAGVYRXMISYGGADYKRITVKVNAPYGSHHHHHH

SEQ ID NO: 1623 - protein, 358 aa, Artificial Sequence
  Synthesized sequence with two or more selenocysteine residues substituted for two or more cysteine residues
  VARIANT (1)...(358): Xaa = selenocysteine or cysteine
MAFTVTVPKDLYVVEYGSNMTIEXKFPVEKQLDLAALIVYWEMEDKNIIQFVHGEEDLKVQHSSYRQRARLLKDQLSLGNAALQITDVKLQDAGVYRXMISYGGADYKRITVKVNAPYGGGGSGGGGSGGGGSAPELLGGPSVFLFPPKPKDTLMISRTPEVTXVVVDVSHEDPEVKFNWYVDGVEVHNAKTKPREEQYNSTYRVVSVLTVLHQDWLNGKEYKXKVSNKALPAPIEKTISKAKGQPREPQVYTKPPSRDELTKNQVSLSXLVKGFYPSDIAVEWESNGQPENNYKTTVPVLDSDGSFRLASYLTVDKSRWQQGNVFSXSVMHEALHNHYTQKSLSLSPGKGSHHHHHH

SEQ ID NO: 1624 - protein, 226 aa, Artificial Sequence
  Synthesized sequence with two or more selenocysteine residues substituted for two or more cysteine residues
  VARIANT (1)...(226): Xaa = selenocysteine or cysteine
MAPELLGGPSVFLFPPKPKDTLMISRTPEVTXVVVDVSHEDPEVKFNWYVDGVEVHNAKTKPREEQYNSTYRVVSVLTVLHQDWLNGKEYKXKVSNKALPAPIEKTISKAKGQPREPQVYTKPPSRDELTKNQVSLSXLVKGFYPSDIAVEWESNGQPENNYKTTVPVLDSDGSFRLASYLTVDKSRWQQGNVFSXSVMHEALHNHYTQKSLSLSPGKGSHHHHHH

SEQ ID NO: 1625 - protein, 116 aa, Artificial Sequence
  Synthesized sequence with two or more selenocysteine residues substituted for two or more cysteine residues
  VARIANT (1)...(116): Xaa = selenocysteine or cysteine
MGQXREPQVYTSPPSRDELTKNQVSLRXHVKGFYPSDIAVEWESNGQPENNYKTTKPVLDSDGSFFLYSKLTVDKSRWQQGNVFSXSVMHEXLHNHYTQKSLSLSPGKGSHHHHHH

SEQ ID NO: 1626 - protein, 322 aa, Artificial Sequence
  Synthesized sequence with two or more selenocysteine residues substituted for two or more cysteine residues
  VARIANT (1)...(322): Xaa = selenocysteine or cysteine
MFPTIPLSRLFDNAMLRAHRLHQLAFDTYQEFEEAYIPKEQKYSFLQNPQTSLXFSESIPTPSNREETQQKSNLELLRISLLLIQSWLEPVQFLRSVFANSLVYGASDSNVYDLLKDLEEGIQTLMGRLEDGSPRTGQIFKQTYSKFDTNSHNDDALLKNYGLLYXFRKDMDKVETFLRIVQXRSVEGSXGFGGGGSGGGGSGGGGSGQXREPQVYTSPPSRDELTKNQVSLRXHVKGFYPSDIAVEWESNGQPENNYKTTKPVLDSDGSFFLYSKLTVDKSRWQQGNVFSXSVMHEXLHNHYTQKSLSLSPGKGSHHHHHH

SEQ ID NO: 1627 - protein, 432 aa, Artificial Sequence
  Synthesized sequence with two or more selenocysteine residues substituted for two or more cysteine residues
  VARIANT (1)...(432): Xaa = selenocysteine or cysteine
MFPTIPLSRLFDNAMLRAHRLHQLAFDTYQEFEEAYIPKEQKYSFLQNPQTSLXFSESIPTPSNREETQQKSNLELLRISLLLIQSWLEPVQFLRSVFANSLVYGASDSNVYDLLKDLEEGIQTLMGRLEDGSPRTGQIFKQTYSKFDTNSHNDDALLKNYGLLYXFRKDMDKVETFLRIVQXRSVEGSXGFGGGGSGGGGSGGGGSAPELLGGPSVFLFPPKPKDTLMISRTPEVTXVVVDVSHEDPEVKFNWYVDGVEVHNAKTKPREEQYNSTYRVVSVLTVLHQDWLNGKEYKXKVSNKALPAPIEKTISKAKGQPREPQVYTKPPSRDELTKNQVSLSXLVKGFYPSDIAVEWESNGQPENNYKTTVPVLDSDGSFRLASYLTVDKSRWQQGNVFSXSVMHEALHNHYTQKSLSLSPGKGSHHHHHH

SEQ ID NO: 1628 - protein, 200 aa, Artificial Sequence
  Synthesized sequence with two or more selenocysteine residues substituted for two or more cysteine residues
  VARIANT (1)...(200): Xaa = selenocysteine or cysteine
MFPTIPLSRLFDNAMLRAHRLHQLAFDTYQEFEEAYIPKEQKYSFLQNPQTSLXFSESIPTPSNREETQQKSNLELLRISLLLIQSWLEPVQFLRSVFANSLVYGASDSNVYDLLKDLEEGIQTLMGRLEDGSPRTGQIFKQTYSKFDTNSHNDDALLKNYGLLYXFRKDMDKVETFLRIVQXRSVEGSXGFGSHHHHHH

SEQ ID NO: 1629 - protein, 255 aa, Artificial Sequence
  Synthesized sequence with two or more selenocysteine residues substituted for two or more cysteine residues
  VARIANT (1)...(255): Xaa = selenocysteine or cysteine
MDIQMTQSPSSLSASVGDRVTITXRASQDVNTAVAWYQQKPGKAPKLLIYSASFLYSGVPSRFSGSRSGTDFTLTISSLQPEDFATYYXQQHYTTPPTFGQGTKVEIKGASGGGGSGGGGSGGGGSSEVQLVESGGGLVQPGGSLRLSXAASGFNIKDTYIHWVRQAPGKGLEWVARIYPTNGYTRYADSVKGRFTISADTSKNTAYLQMNSLRAEDTAVYYXSRWGGDGFYAMDYWGQGTLVTVSSGSHHHHHH

SEQ ID NO: 1630 - protein, 110 aa, Homo sapiens
MALWMRLLPLLALLALWGPDPAAAFVNQHLCGSHLVEALYLVCGERGFFYTPKTRREAEDLQVGQVELGGGPGAGSLQPLALEGSLQKRGIVEQCCTSICSLYQLENYCN

SEQ ID NO: 1631 - protein, 252 aa, Artificial sequence
  Synthetic polypeptide
  VARIANT (23)..(23): Xaa = selenocysteine
  VARIANT (97)..(97): Xaa = selenocysteine
  VARIANT (159)..(159): Xaa = selenocysteine
  VARIANT (224)..(224): Xaa = selenocysteine
MEVQLLESGGGLAKPGGSLRLSXAASGFTFTDYYMDWVRQAPGKGLEWVSRISPGGDVTWYADSVKGRFTISRDNAQNTLYLQMNSLRAEDTAVYFXARDDIVVSRIFDDWGQGVLLTVSSGGGGSGGGGSGGGGSELQMTQSPSSLSASVGDRVTITXRASQSIRSYLAWYQQKPGKAPKLLIYDAAHLQSGVPSRFSGSGSGTEFSLTISSLQPEDFAVYYXQQRNSYPLTFGGGTKVEIKRGSHHHHHH

1. A protein comprising at least two selenocysteine residues with at least one diselenide bond between the at least two selenocysteine residues, wherein the protein comprises a sequence selected from the group consisting of: SEQ ID NO: 1-1630 and sequences that are at least 80% identical to said sequence.

2. A protein according to claim 1 comprising at least two selenocysteine residues with at least one diselenide bond between the at least two selenocysteine residues, wherein the protein comprises a sequence of SEQ ID NO: 1631 and sequences that are at least 80% identical to said sequence.

3. An antibody molecule comprising:
a heavy chain sequence selected from the group consisting of SEQ ID NO: 472-801 and sequences that are at least 80% identical to said sequence; and
a light chain sequence selected from the group consisting of SEQ ID NO: 812-1131 and sequences that are at least 80% identical to said sequence,
wherein from 0-15 pairs of selenocysteine residues in the antibody molecule are replaced with from 0-15 pairs of cysteine residues, and wherein the antibody contains at least one diselenide bond between the heavy chain and the light chain.

4. A modified insulin protein comprising:
an A chain having a sequence selected from SEQ ID NO: 1142, 1144, 1146, 1148, 1150, 1152, and 1154 and sequences that are at least 80% identical to said sequence;
a B chain having a sequence selected from SEQ ID NO: 1143, 1145, 1147, 1149, 1151, 1153, and 1155 and sequences that are at least 80% identical to said sequence;
wherein the protein comprises at least one diselenide bond between the A chain and the B chain.

5. A bacterial host that has been genomically recoded so that an unassigned codon is recognized by a selenocysteine tRNA with a corresponding anticodon, wherein the bacterial host contains a constructed DNA sequence encoding a variant form of a protein in which a pair of cysteine codons has been replaced with the unassigned codon wherein the variant form comprises a sequence selected from the group consisting of SEQ ID NO: 1-1630 and sequences that are at least 80% identical to said said sequence.

6. A bacterial host according to claim 5 that has been genomically recoded so that an unassigned codon is recognized by a selenocysteine tRNA with a corresponding anticodon, wherein the bacterial host contains a constructed DNA sequence encoding a variant form of a protein in which a pair of cysteine codons has been replaced with the unassigned codon wherein the variant form comprises a sequence of SEQ ID NO: 1631 and sequences that are at least 80% identical to said sequence.

7. The bacterial host of claim 5 or 6 wherein the variant form is a monoclonal antibody.

8. The bacterial host of claim 7 wherein the monoclonal antibody comprises a heavy chain sequence selected from the group consisting of SEQ ID NO: 472-801 and sequences that are at least 80% identical to said sequence.

9. The bacterial host of claim 7 wherein the monoclonal antibody comprises a light chain sequence selected from the group consisting of SEQ ID NO: 812-1131 and sequences that are at least 80% identical to said sequence.

10. The bacterial host of claim 7 wherein the monoclonal antibody comprises a heavy chain variable region sequence selected from the group consisting of SEQ ID NO: 16-243 and sequences that are at least 80% identical to said sequence.

11. The bacterial host of claim 7 wherein the monoclonal antibody comprises a light chain variable region sequence selected from the group consisting of SEQ ID NO: 244-471 and sequences that are at least 80% identical to said sequence.

12. The bacterial host of claim 10 or 11 wherein the monoclonal antibody further comprises a constant chain sequence selected from the group consisting of SEQ ID NO: 1-15 and sequences that are at least 80% identical to said sequence.

13. The bacterial host of claim 5 or 6 wherein the variant form is a therapeutic protein.

14. The bacterial host of claim 5 or 6 wherein the variant form is a prophylactic protein.

15. The bacterial host of claim 5 or 6 wherein the unassigned codon is a UAG.

16. A bacterial host that has been genomically recoded so that an unassigned codon is recognized by a selenocysteine tRNA with a corresponding anticodon, wherein the bacterial host contains a constructed DNA sequence encoding a variant form of a monoclonal antibody in which a pair of cysteine codons has been replaced with the unassigned codon, wherein the monoclonal antibody comprises a VL chain and positions 23 and 88 of the VL chain are substituted with selenocysteine residues, and the monoclonal antibody comprises a VH chain and positions 22 and 92 of the VH chain are substituted with selenocysteine residues.

17. The bacterial host of claim 16 wherein the unassigned codon is a UAG.

18. A method of producing a variant form of a protein, wherein the protein has a disulfide bond between cysteine residues, wherein the variant form has a diselenide bond between selenocysteine residues, comprising:
culturing a bacterial host that has been genomically recoded so that an unassigned codon is recognized by a selenocysteine tRNA with a corresponding anticodon, wherein the bacterial host contains a constructed DNA sequence encoding the variant form of the protein in which a pair of cysteine codons has been replaced with the unassigned codon, wherein the culturing is under conditions in which the variant form of the protein is expressed, wherein the variant form comprises a sequence selected from the group consisting of SEQ ID NO: 1-1630 and sequences that are at least 80% identical to said sequence.

19. A method of producing a variant form of a protein according to claim 18, wherein the protein has a disulfide bond between cysteine residues, wherein the variant form has a diselenide bond between selenocysteine residues, comprising:
culturing a bacterial host that has been genomically recoded so that an unassigned codon is recognized by a selenocysteine tRNA with a corresponding anticodon, wherein the bacterial host contains a constructed DNA sequence encoding the variant form of the protein in which a pair of cysteine codons has been replaced with the unassigned codon, wherein the culturing is under conditions in which the variant form of the protein is expressed, wherein the variant form comprises a sequence of SEQ ID NO: 1631 and sequences that are at least 80% identical to said sequence.

20. The method of claim 18 or 19 further comprising the step of harvesting the variant form of the protein from culture medium or from cells of the bacterial host.

21. The method of claim 18 or 19 wherein the variant form is a monoclonal antibody.

22. The method of claim 21 wherein the monoclonal antibody comprises a heavy chain sequence selected from the group consisting of SEQ ID NO: 472-801 and sequences that are at least 80% identical to said sequence.

23. The method of claim 21 wherein the monoclonal antibody comprises a light chain sequence selected from the group consisting of SEQ ID NO: 812-1131 and sequences that are at least 80% identical to said sequence.

24. The method of claim 21 wherein the monoclonal antibody comprises a heavy chain variable region sequence selected from the group consisting of SEQ ID NO: 16-243 and sequences that are at least 80% identical to said sequence.

25. The method of claim 21 wherein the monoclonal antibody comprises a light chain variable region sequence selected from the group consisting of SEQ ID NO: 244-471 and sequences that are at least 80% identical to said sequence.

26. The method of claim 24 or 25 wherein the monoclonal antibody further comprises a constant chain sequence selected from the group consisting of SEQ ID NO: 1-15 and sequences that are at least 80% identical to said sequence.

27. The method of claim 18 or 19 wherein the variant form is a therapeutic protein.

28. The method of claim 18 or 19 wherein the variant form is a prophylactic protein.

29. The method of claim 18 or 19 wherein the unassigned codon is UAG.

30. A method of producing a variant form of a monoclonal antibody, wherein the monoclonal antibody has a disulfide bond between cysteine residues, wherein the variant form has a diselenide bond between selenocysteine residues, comprising:
culturing a bacterial host that has been genomically recoded so that an unassigned codon is recognized by a selenocysteine tRNA with a corresponding anticodon, wherein the bacterial host contains a constructed DNA sequence encoding the variant form of the monoclonal antibody in which a pair of cysteine codons has been replaced with the unassigned codon, wherein the culturing is under conditions in which the variant form of the monoclonal antibody is expressed, wherein the monoclonal antibody comprises a VL chain and positions 23 and 88 of the VL chain are substituted with selenocysteine residues, and the monoclonal antibody comprises a VH chain and positions 22 and 92 of the VH chain are substituted with selenocysteine residues.

31. The method of claim 30 wherein the unassigned codon is a UAG.

32. A method of treating a mammal with a variant form of a protein, comprising the step of:
administering to the mammal the variant form of the protein, wherein the protein has a disulfide bond between cysteine residues, wherein the variant form has a diselenide bond between selenocysteine residues in place of the disulfide bond between cysteine residues, wherein the variant form comprises a sequence selected from the group consisting of SEQ ID NO: 1-1630 and sequences that are at least 80% identical to said sequence.

33. A method of treating a mammal according to claim 32 with a variant form of a protein, comprising the step of:
administering to the mammal the variant form of the protein, wherein the protein has a disulfide bond between cysteine residues, wherein the variant form has a diselenide bond between selenocysteine residues in place of the disulfide bond between cysteine residues, wherein the variant form comprises a sequence of SEQ ID NO: 1631 and sequences that are at least 80% identical to said sequence.

34. The method of claim 32 or 33 wherein the administering is intravenous.

35. The method of claim 32 or 33 wherein the protein is a monoclonal antibody.

36. The method of claim 32 or 33 wherein the protein is a therapeutic protein.

37. The method of claim 32 or 33 wherein the protein is a prophylactic protein.

38. A method of treating a mammal with a variant form of a monoclonal antibody, comprising the step of:
administering to the mammal the variant form of the monoclonal antibody, wherein the monoclonal antibody has a disulfide bond between cysteine residues, wherein the variant form has a diselenide bond between selenocysteine residues in place of the disulfide bond between cysteine residues, wherein the monoclonal antibody comprises comprises a VL chain and positions 23 and 88 of the VL chain are substituted with selenocysteine residues, and the monoclonal antibody comprises a VH chain and positions 22 and 92 of the VH chain are substituted with selenocysteine residues.

39. The antibody of claim 3 wherein at least one pair of selenocysteine residues in the antibody molecule is replaced with one pair of cysteine residues.

40. The antibody molecule of claim 3 wherein one pair of selenocysteine residues in the antibody molecule is replaced with one pair of cysteine residues.

41. The antibody molecule of claim 3 wherein two pairs of selenocysteine residues in the antibody molecule are replaced with two pairs of cysteine residues.

42. The antibody molecule of claim 3 wherein three pairs of selenocysteine residues in the antibody molecule are replaced with three pairs of cysteine residues.

43. The antibody molecule of claim 3 wherein four pairs of selenocysteine residues in the antibody molecule are replaced with four pairs of cysteine residues.

44. The antibody molecule of claim 3 wherein at five pairs of selenocysteine residues in the antibody molecule are replaced with five pairs of cysteine residues.

45. The antibody molecule of claim 3 wherein six pairs of selenocysteine residues in the antibody molecule are replaced with six pairs of cysteine residues.

46. The antibody molecule of claim 3 wherein seven pairs of selenocysteine residues in the antibody molecule are replaced with seven pairs of cysteine residues.

47. The antibody molecule of claim 3 wherein eight pairs of selenocysteine residues in the antibody molecule are replaced with eight pairs of cysteine residues.

48. The antibody molecule of claim 3 wherein nine pairs of selenocysteine residues in the antibody molecule are replaced with nine pairs of cysteine residues.

49. The antibody molecule of claim 3 wherein ten pairs of selenocysteine residues in the antibody molecule are replaced with ten pairs of cysteine residues.

50. The antibody molecule of claim 3 wherein eleven pairs of selenocysteine residues in the antibody molecule are replaced with eleven pairs of cysteine residues.

51. The antibody molecule of claim 3 wherein twelve pairs of selenocysteine residues in the antibody molecule are replaced with twelve pairs of cysteine residues.

52. The antibody molecule of claim 3 wherein thirteen pairs of selenocysteine residues in the antibody molecule are replaced with thirteen pairs of cysteine residues.

53. The antibody molecule of claim 3 wherein fourteen pairs of selenocysteine residues in the antibody molecule are replaced with fourteen pairs of cysteine residues.

54. The antibody molecule of claim 3 wherein fifteen pairs of selenocysteine residues in the antibody molecule are replaced with fifteen pairs of cysteine residues.

55. An in vitro translation system or in vitro transcription and translation system comprising a constructed nucleic acid molecule and a tRNA molecule, wherein the constructed nucleic acid molecule encodes a variant form of a protein in which a pair of cysteine residues has been replaced with a pair of selenocysteine residues, wherein the variant form comprises a sequence selected from the group consisting of SEQ ID NO: 1-1631 and sequences that are at least 80% identical to said sequence, wherein the nucleic acid molecule comprises an unassigned codon or leverages cognate codon suppression to incorporate selenocyteine residues, wherein the tRNA molecule is a selenocysteine tRNA with an anticodon that corresponds to the unassigned codon.

56. The in vitro translation system or in vitro transcription and translation system of claim 55 wherein the variant form is a monoclonal antibody.

57. The in vitro translation system or in vitro transcription and translation system of claim 55 wherein the monoclonal antibody comprises a heavy chain sequence selected from the group consisting of SEQ ID NO: 472-801 and sequences that are at least 80% identical to said sequence.

58. The in vitro translation system or in vitro transcription and translation system of claim 55 wherein the monoclonal antibody comprises a light chain sequence selected from the group consisting of SEQ ID NO: 812-1131 and sequences that are at least 80% identical to said sequence.

59. The in vitro translation system or in vitro transcription and translation system of claim 55 wherein the monoclonal antibody comprises a heavy chain variable region sequence selected from the group consisting of SEQ ID NO: 16-243 and sequences that are at least 80% identical to said sequence.

60. The in vitro translation system or in vitro transcription and translation system of claim 55 wherein the monoclonal antibody comprises a light chain variable region sequence selected from the group consisting of SEQ ID NO: 244-471 and sequences that are at least 80% identical to said sequence.

61. The in vitro translation system or in vitro transcription and translation system of claim 55 wherein the monoclonal antibody further comprises a constant chain sequence selected from the group consisting of SEQ ID NO: 1-15 and sequences that are at least 80% identical to said sequence.

62. The in vitro translation system or in vitro transcription and translation system of claim 55 wherein the variant form is a therapeutic protein.

63. The in vitro translation system or in vitro transcription and translation system of claim 55 wherein the variant form is a prophylactic protein.

64. The in vitro translation system or in vitro transcription and translation system of claim 55 wherein the unassigned codon is a UAG.

65. An in vitro translation system or in vitro transcription and translation system comprising a constructed nucleic acid molecule and a tRNA molecule, wherein the constructed nucleic acid molecule encodes a variant form of a monoclonal antibody which comprises a VL chain and positions 23 and 88 of the VL chain are substituted with selenocysteine residues and the monoclonal antibody comprises a VH chain and positions 22 and 92 of the VH chain are substituted with selenocysteine residues, wherein the constructed nucleic acid molecule comprises at least a pair of cysteine codons that has been replaced with an unassigned codon in the nucleic acid, wherein the tRNA molecule is a selenocysteine tRNA with an anticodon that is complementary to the unassigned codon.

66. The in vitro translation system or in vitro transcription and translation system of claim 65 wherein the unassigned codon is a UAG.

67. A method of producing a variant form of a protein, wherein the protein has a disulfide bond between cysteine residues, wherein the variant form has a diselenide bond between selenocysteine residues, comprising:
translating in vitro a constructed nucleic acid sequence encoding the variant form of the protein, wherein in said constructed nucleic acid sequence a pair of cysteine codons has been replaced with an unassigned codon, wherein the variant form comprises a sequence selected from the group consisting of SEQ ID NO: 1-1630 and sequences that are at least 80% identical to said sequence, wherein said step of translating employs a selenocysteine tRNA with a corresponding anticodon to the unassigned codon.

68. A method according to claim 67 of producing a variant form of a protein, wherein the protein has a disulfide bond between cysteine residues, wherein the variant form has a diselenide bond between selenocysteine residues, comprising:
translating in vitro a constructed nucleic acid sequence encoding the variant form of the protein, wherein in said constructed nucleic acid sequence a pair of cysteine codons has been replaced with an unassigned codon, wherein the variant form comprises a sequence of SEQ ID NO: 1631 and sequences that are at least 80% identical to said sequence, wherein said step of translating employs a selenocysteine tRNA with a corresponding anticodon to the unassigned codon.

69. The method of claim 67 or 68 wherein the variant form is a monoclonal antibody.

70. The method of claim 69 wherein the monoclonal antibody comprises a heavy chain sequence selected from the group consisting of SEQ ID NO: 472-801 and sequences that are at least 80% identical to said sequence.

71. The method of claim 69 wherein the monoclonal antibody comprises a light chain sequence selected from the group consisting of SEQ ID NO: 812-1131 and sequences that are at least 80% identical to said sequence.

72. The method of claim 69 wherein the monoclonal antibody comprises a heavy chain variable region sequence selected from the group consisting of SEQ ID NO: 16-243 and sequences that are at least 80% identical to said sequence.

73. The method of claim 69 wherein the monoclonal antibody comprises a light chain variable region sequence selected from the group consisting of SEQ ID NO: 244-471 and sequences that are at least 80% identical to said sequence.

74. The method of claim 72 or 73 wherein the monoclonal antibody further comprises a constant chain sequence selected from the group consisting of SEQ ID NO: 1-15 and sequences that are at least 80% identical to said sequence.

75. The method of claim 67 or 68 wherein the variant form is a therapeutic protein.

76. The method of claim 67 or 68 wherein the variant form is a prophylactic protein.

77. The method of claim 67 or 68 wherein the unassigned codon is UAG.

78. A method of testing a sample, comprising the step of:
contacting a sample with a variant form of a protein to form a reaction mixture, wherein the protein has a disulfide bond between cysteine residues, wherein the variant form has a diselenide bond between selenocysteine residues in place of the disulfide bond between cysteine residues, wherein the variant form comprises a sequence selected from the group consisting of SEQ ID NO: 1-1630 and sequences that are at least 80% identical to said sequence; and
testing the reaction mixture to detect a specific binding partner bound to the variant form of the protein.

79. A method according to claim 78 of testing a sample, comprising the step of:
contacting a sample with a variant form of a protein to form a reaction mixture, wherein the protein has a disulfide bond between cysteine residues, wherein the variant form has a diselenide bond between selenocysteine residues in place of the disulfide bond between cysteine residues, wherein the variant form comprises a sequence of SEQ ID NO: 1631 and sequences that are at least 80% identical to said sequence; and
testing the reaction mixture to detect a specific binding partner bound to the variant form of the protein.

80. A method testing a sample, comprising the step of:
contacting a sample with a variant form of a monoclonal antibody to form a reaction mixture, wherein the monoclonal antibody has a disulfide bond between cysteine residues, wherein the variant form has a diselenide bond between selenocysteine residues in place of the disulfide bond between cysteine residues, wherein the monoclonal antibody comprises a VL chain and positions 23 and 88 of the VL chain are substituted with selenocysteine residues, and the monoclonal antibody comprises a VH chain and positions 22 and 92 of the VH chain are substituted with selenocysteine residues; and
testing the reaction mixture to detect a specific binding partner bound to the variant form of the protein.

81. A modified antibody comprising at least one diselenide bond

82. The modified antibody of claim 81 wherein the diselenide bond is in the location of a disulfide bond in an occurring antibody of the same specificity.

83. The modified antibody of claim 81 wherein the diselenide bond is intermolecular.

84. The modified antibody of claim 81 which is selected from an isotype selected from the group consisting of IgA, IgD, IgE, IgG, and IgM.

85. A modified insulin protein comprising: an A chain having residues 90-110 of SEQ ID NO: 1630 with at least one cysteine to selenocysteine substitution; a B chain having residues 25-54 of SEQ ID NO: 1630 with at least one cysteine to selenocysteine substitution; and at least one diselenide bridge between the A chain and the B chain.

86. A modified human insulin protein comprising at least two selenocysteine residues replacing two cysteine residues in a native human insulin protein, with at least one diselenide bond between the at least two selenocysteine residues.

87. The modified human insulin protein of claim 86 which is produced in a recombinant bacterium.

88. The modified human insulin protein of claim 87 wherein the recombinant bacterium is recoded so that a selenocysteine tRNA recognizes an amber codon in the bacterium.
